United States Patent Application Publication US 2026/0375158 A1, published November 26, 2026 (application 19/484,700).

The application's sequence listing, which the Patent Office published only in electronic form, follows.

SEQUENCE LISTING (1659 sequences)

SEQ ID NO: 1 - RNA, 20 nt, synthetic construct
  misc_feature 1..20: note = Synthetic
  source 1..20: mol_type = other RNA
actctctctttctggcctgg

SEQ ID NO: 2 - RNA, 19 nt, synthetic construct
  misc_feature 1..19: note = Synthetic
  source 1..19: mol_type = other RNA
ctctctctttctggcctgg

SEQ ID NO: 3 - RNA, 18 nt, synthetic construct
  misc_feature 1..18: note = Synthetic
  source 1..18: mol_type = other RNA
tctctctttctggcctgg

SEQ ID NO: 4 - RNA, 17 nt, synthetic construct
  misc_feature 1..17: note = Synthetic
  source 1..17: mol_type = other RNA
ctctctttctggcctgg

SEQ ID NO: 5-9 - skipped (5 entries)

SEQ ID NO: 10 - RNA, 10 nt, synthetic construct
  misc_feature 1..10: note = Synthetic
  source 1..10: mol_type = other RNA
ggccagaaag

SEQ ID NO: 11 - RNA, 11 nt, synthetic construct
  misc_feature 1..11: note = Synthetic
  source 1..11: mol_type = other RNA
ggccagaaaga

SEQ ID NO: 12 - RNA, 12 nt, synthetic construct
  misc_feature 1..12: note = Synthetic
  source 1..12: mol_type = other RNA
ggccagaaagag

SEQ ID NO: 13 - RNA, 13 nt, synthetic construct
  misc_feature 1..13: note = Synthetic
  source 1..13: mol_type = other RNA
ggccagaaagaga

SEQ ID NO: 14 - RNA, 14 nt, synthetic construct
  misc_feature 1..14: note = Synthetic
  source 1..14: mol_type = other RNA
ggccagaaagagag

SEQ ID NO: 15 - RNA, 15 nt, synthetic construct
  misc_feature 1..15: note = Synthetic
  source 1..15: mol_type = other RNA
ggccagaaagagaga

SEQ ID NO: 16 - RNA, 16 nt, synthetic construct
  misc_feature 1..16: note = Synthetic
  source 1..16: mol_type = other RNA
ggccagaaagagagag

SEQ ID NO: 17 - RNA, 17 nt, synthetic construct
  misc_feature 1..17: note = Synthetic
  source 1..17: mol_type = other RNA
ggccagaaagagagagt

SEQ ID NO: 18 - RNA, 16 nt, synthetic construct
  misc_feature 1..16: note = Synthetic
  source 1..16: mol_type = other RNA
atagcctcttattaca

SEQ ID NO: 19 - RNA, 20 nt, synthetic construct
  misc_feature 1..20: note = Synthetic
  source 1..20: mol_type = other RNA
ctggatagcctcttattaca

SEQ ID NO: 20 - RNA, 24 nt, synthetic construct
  misc_feature 1..24: note = Synthetic
  source 1..24: mol_type = other RNA
cacgctggatagcctcttattaca

SEQ ID NO: 21 - RNA, 121 nt, synthetic construct
  misc_feature 1..121: note = Synthetic
  source 1..121: mol_type = other RNA
actctctctttctggcctgggtttaagagctagaaatagcaagtttaaataaggctagtccgttatcagcgtgaaaacgcggcaccgagtcggtgcatagcctcttattacaggccagaaa

SEQ ID NO: 22 - RNA, 125 nt, synthetic construct
  misc_feature 1..125: note = Synthetic
  source 1..125: mol_type = other RNA
actctctctttctggcctgggtttaagagctagaaatagcaagtttaaataaggctagtccgttatcagcgtgaaaacgcggcaccgagtcggtgcctggatagcctcttattacaggccagaaa

SEQ ID NO: 23 - RNA, 129 nt, synthetic construct
  misc_feature 1..129: note = Synthetic
  source 1..129: mol_type = other RNA
actctctctttctggcctgggtttaagagctagaaatagcaagtttaaataaggctagtccgttatcagcgtgaaaacgcggcaccgagtcggtgccacgctggatagcctcttattacaggccagaaa

SEQ ID NO: 24 - RNA, 124 nt, synthetic construct
  misc_feature 1..124: note = Synthetic
  source 1..124: mol_type = other RNA
actctctctttctggcctgggtttaagagctagaaatagcaagtttaaataaggctagtccgttatcagcgtgaaaacgcggcaccgagtcggtgcatagcctcttattacaggccagaaagag

SEQ ID NO: 25 - RNA, 128 nt, synthetic construct
  misc_feature 1..128: note = Synthetic
  source 1..128: mol_type = other RNA
actctctctttctggcctgggtttaagagctagaaatagcaagtttaaataaggctagtccgttatcagcgtgaaaacgcggcaccgagtcggtgcctggatagcctcttattacaggccagaaagag

SEQ ID NO: 26 - RNA, 132 nt, synthetic construct
  misc_feature 1..132: note = Synthetic
  source 1..132: mol_type = other RNA
actctctctttctggcctgggtttaagagctagaaatagcaagtttaaataaggctagtccgttatcagcgtgaaaacgcggcaccgagtcggtgccacgctggatagcctcttattacaggccagaaagag

SEQ ID NO: 27 - RNA, 127 nt, synthetic construct
  misc_feature 1..127: note = Synthetic
  source 1..127: mol_type = other RNA
actctctctttctggcctgggtttaagagctagaaatagcaagtttaaataaggctagtccgttatcagcgtgaaaacgcggcaccgagtcggtgcatagcctcttattacaggccagaaagagaga

SEQ ID NO: 28 - RNA, 131 nt, synthetic construct
  misc_feature 1..131: note = Synthetic
  source 1..131: mol_type = other RNA
actctctctttctggcctgggtttaagagctagaaatagcaagtttaaataaggctagtccgttatcagcgtgaaaacgcggcaccgagtcggtgcctggatagcctcttattacaggccagaaagagaga

SEQ ID NO: 29 - RNA, 135 nt, synthetic construct
  misc_feature 1..135: note = Synthetic
  source 1..135: mol_type = other RNA
actctctctttctggcctgggtttaagagctagaaatagcaagtttaaataaggctagtccgttatcagcgtgaaaacgcggcaccgagtcggtgccacgctggatagcctcttattacaggccagaaagagaga

SEQ ID NO: 30 - RNA, 20 nt, synthetic construct
  misc_feature 1..20: note = Synthetic
  source 1..20: mol_type = other RNA
ggccgagatgtctcgctccg

SEQ ID NO: 31 - RNA, 19 nt, synthetic construct
  misc_feature 1..19: note = Synthetic
  source 1..19: mol_type = other RNA
gccgagatgtctcgctccg

SEQ ID NO: 32 - RNA, 18 nt, synthetic construct
  misc_feature 1..18: note = Synthetic
  source 1..18: mol_type = other RNA
ccgagatgtctcgctccg

SEQ ID NO: 33 - RNA, 17 nt, synthetic construct
  misc_feature 1..17: note = Synthetic
  source 1..17: mol_type = other RNA
cgagatgtctcgctccg

SEQ ID NO: 34-38 - skipped (5 entries)

SEQ ID NO: 39 - RNA, 10 nt, synthetic construct
  misc_feature 1..10: note = Synthetic
  source 1..10: mol_type = other RNA
agcgagacat

SEQ ID NO: 40 - RNA, 11 nt, synthetic construct
  misc_feature 1..11: note = Synthetic
  source 1..11: mol_type = other RNA
agcgagacatc

SEQ ID NO: 41 - RNA, 12 nt, synthetic construct
  misc_feature 1..12: note = Synthetic
  source 1..12: mol_type = other RNA
agcgagacatct

SEQ ID NO: 42 - RNA, 13 nt, synthetic construct
  misc_feature 1..13: note = Synthetic
  source 1..13: mol_type = other RNA
agcgagacatctc

SEQ ID NO: 43 - RNA, 14 nt, synthetic construct
  misc_feature 1..14: note = Synthetic
  source 1..14: mol_type = other RNA
agcgagacatctcg

SEQ ID NO: 44 - RNA, 15 nt, synthetic construct
  misc_feature 1..15: note = Synthetic
  source 1..15: mol_type = other RNA
agcgagacatctcgg

SEQ ID NO: 45 - RNA, 16 nt, synthetic construct
  misc_feature 1..16: note = Synthetic
  source 1..16: mol_type = other RNA
agcgagacatctcggc

SEQ ID NO: 46 - RNA, 17 nt, synthetic construct
  misc_feature 1..17: note = Synthetic
  source 1..17: mol_type = other RNA
agcgagacatctcggcc

SEQ ID NO: 47 - RNA, 16 nt, synthetic construct
  misc_feature 1..16: note = Synthetic
  source 1..16: mol_type = other RNA
aaggccacttattagg

SEQ ID NO: 48 - RNA, 20 nt, synthetic construct
  misc_feature 1..20: note = Synthetic
  source 1..20: mol_type = other RNA
agctaaggccacttattagg

SEQ ID NO: 49 - RNA, 24 nt, synthetic construct
  misc_feature 1..24: note = Synthetic
  source 1..24: mol_type = other RNA
gcacagctaaggccacttattagg

SEQ ID NO: 50 - RNA, 121 nt, synthetic construct
  misc_feature 1..121: note = Synthetic
  source 1..121: mol_type = other RNA
ggccgagatgtctcgctccggtttaagagctagaaatagcaagtttaaataaggctagtccgttatcagcgtgaaaacgcggcaccgagtcggtgcaaggccacttattaggagcgagaca

SEQ ID NO: 51 - RNA, 125 nt, synthetic construct
  misc_feature 1..125: note = Synthetic
  source 1..125: mol_type = other RNA
ggccgagatgtctcgctccggtttaagagctagaaatagcaagtttaaataaggctagtccgttatcagcgtgaaaacgcggcaccgagtcggtgcagctaaggccacttattaggagcgagaca

SEQ ID NO: 52 - RNA, 129 nt, synthetic construct
  misc_feature 1..129: note = Synthetic
  source 1..129: mol_type = other RNA
ggccgagatgtctcgctccggtttaagagctagaaatagcaagtttaaataaggctagtccgttatcagcgtgaaaacgcggcaccgagtcggtgcgcacagctaaggccacttattaggagcgagaca

SEQ ID NO: 53 - RNA, 124 nt, synthetic construct
  misc_feature 1..124: note = Synthetic
  source 1..124: mol_type = other RNA
ggccgagatgtctcgctccggtttaagagctagaaatagcaagtttaaataaggctagtccgttatcagcgtgaaaacgcggcaccgagtcggtgcaaggccacttattaggagcgagacatct

SEQ ID NO: 54 - RNA, 128 nt, synthetic construct
  misc_feature 1..128: note = Synthetic
  source 1..128: mol_type = other RNA
ggccgagatgtctcgctccggtttaagagctagaaatagcaagtttaaataaggctagtccgttatcagcgtgaaaacgcggcaccgagtcggtgcagctaaggccacttattaggagcgagacatct

SEQ ID NO: 55 - RNA, 132 nt, synthetic construct
  misc_feature 1..132: note = Synthetic
  source 1..132: mol_type = other RNA
ggccgagatgtctcgctccggtttaagagctagaaatagcaagtttaaataaggctagtccgttatcagcgtgaaaacgcggcaccgagtcggtgcgcacagctaaggccacttattaggagcgagacatct

SEQ ID NO: 56 - RNA, 127 nt, synthetic construct
  misc_feature 1..127: note = Synthetic
  source 1..127: mol_type = other RNA
ggccgagatgtctcgctccggtttaagagctagaaatagcaagtttaaataaggctagtccgttatcagcgtgaaaacgcggcaccgagtcggtgcaaggccacttattaggagcgagacatctcgg

SEQ ID NO: 57 - RNA, 131 nt, synthetic construct
  misc_feature 1..131: note = Synthetic
  source 1..131: mol_type = other RNA
ggccgagatgtctcgctccggtttaagagctagaaatagcaagtttaaataaggctagtccgttatcagcgtgaaaacgcggcaccgagtcggtgcagctaaggccacttattaggagcgagacatctcgg

SEQ ID NO: 58 - RNA, 135 nt, synthetic construct
  misc_feature 1..135: note = Synthetic
  source 1..135: mol_type = other RNA
ggccgagatgtctcgctccggtttaagagctagaaatagcaagtttaaataaggctagtccgttatcagcgtgaaaacgcggcaccgagtcggtgcgcacagctaaggccacttattaggagcgagacatctcgg

SEQ ID NO: 59 - RNA, 20 nt, synthetic construct
  misc_feature 1..20: note = Synthetic
  source 1..20: mol_type = other RNA
ctcgcgctactctctctttc

SEQ ID NO: 60 - RNA, 19 nt, synthetic construct
  misc_feature 1..19: note = Synthetic
  source 1..19: mol_type = other RNA
tcgcgctactctctctttc

SEQ ID NO: 61 - RNA, 18 nt, synthetic construct
  misc_feature 1..18: note = Synthetic
  source 1..18: mol_type = other RNA
cgcgctactctctctttc

SEQ ID NO: 62 - RNA, 17 nt, synthetic construct
  misc_feature 1..17: note = Synthetic
  source 1..17: mol_type = other RNA
gcgctactctctctttc

SEQ ID NO: 63-67 - skipped (5 entries)

SEQ ID NO: 68 - RNA, 10 nt, synthetic construct
  misc_feature 1..10: note = Synthetic
  source 1..10: mol_type = other RNA
agagagagta

SEQ ID NO: 69 - RNA, 11 nt, synthetic construct
  misc_feature 1..11: note = Synthetic
  source 1..11: mol_type = other RNA
agagagagtag

SEQ ID NO: 70 - RNA, 12 nt, synthetic construct
  misc_feature 1..12: note = Synthetic
  source 1..12: mol_type = other RNA
agagagagtagc

SEQ ID NO: 71 - RNA, 13 nt, synthetic construct
  misc_feature 1..13: note = Synthetic
  source 1..13: mol_type = other RNA
agagagagtagcg

SEQ ID NO: 72 - RNA, 14 nt, synthetic construct
  misc_feature 1..14: note = Synthetic
  source 1..14: mol_type = other RNA
agagagagtagcgc

SEQ ID NO: 73 - RNA, 15 nt, synthetic construct
  misc_feature 1..15: note = Synthetic
  source 1..15: mol_type = other RNA
agagagagtagcgcg

SEQ ID NO: 74 - RNA, 16 nt, synthetic construct
  misc_feature 1..16: note = Synthetic
  source 1..16: mol_type = other RNA
agagagagtagcgcga

SEQ ID NO: 75 - RNA, 17 nt, synthetic construct
  misc_feature 1..17: note = Synthetic
  source 1..17: mol_type = other RNA
agagagagtagcgcgag

SEQ ID NO: 76 - RNA, 16 nt, synthetic construct
  misc_feature 1..16: note = Synthetic
  source 1..16: mol_type = other RNA
caggccagattattaa

SEQ ID NO: 77 - RNA, 20 nt, synthetic construct
  misc_feature 1..20: note = Synthetic
  source 1..20: mol_type = other RNA
cctccaggccagattattaa

SEQ ID NO: 78 - RNA, 24 nt, synthetic construct
  misc_feature 1..24: note = Synthetic
  source 1..24: mol_type = other RNA
atagcctccaggccagattattaa

SEQ ID NO: 79 - RNA, 121 nt, synthetic construct
  misc_feature 1..121: note = Synthetic
  source 1..121: mol_type = other RNA
ctcgcgctactctctctttcgtttaagagctagaaatagcaagtttaaataaggctagtccgttatcagcgtgaaaacgcggcaccgagtcggtgccaggccagattattaaagagagagt

SEQ ID NO: 80 - RNA, 125 nt, synthetic construct
  misc_feature 1..125: note = Synthetic
  source 1..125: mol_type = other RNA
ctcgcgctactctctctttcgtttaagagctagaaatagcaagtttaaataaggctagtccgttatcagcgtgaaaacgcggcaccgagtcggtgccctccaggccagattattaaagagagagt

SEQ ID NO: 81 - RNA, 129 nt, synthetic construct
  misc_feature 1..129: note = Synthetic
  source 1..129: mol_type = other RNA
ctcgcgctactctctctttcgtttaagagctagaaatagcaagtttaaataaggctagtccgttatcagcgtgaaaacgcggcaccgagtcggtgcatagcctccaggccagattattaaagagagagt

SEQ ID NO: 82 - RNA, 124 nt, synthetic construct
  misc_feature 1..124: note = Synthetic
  source 1..124: mol_type = other RNA
ctcgcgctactctctctttcgtttaagagctagaaatagcaagtttaaataaggctagtccgttatcagcgtgaaaacgcggcaccgagtcggtgccaggccagattattaaagagagagtagc

SEQ ID NO: 83 - RNA, 128 nt, synthetic construct
  misc_feature 1..128: note = Synthetic
  source 1..128: mol_type = other RNA
ctcgcgctactctctctttcgtttaagagctagaaatagcaagtttaaataaggctagtccgttatcagcgtgaaaacgcggcaccgagtcggtgccctccaggccagattattaaagagagagtagc

SEQ ID NO: 84 - RNA, 132 nt, synthetic construct
  misc_feature 1..132: note = Synthetic
  source 1..132: mol_type = other RNA
ctcgcgctactctctctttcgtttaagagctagaaatagcaagtttaaataaggctagtccgttatcagcgtgaaaacgcggcaccgagtcggtgcatagcctccaggccagattattaaagagagagtagc

SEQ ID NO: 85 - RNA, 127 nt, synthetic construct
  misc_feature 1..127: note = Synthetic
  source 1..127: mol_type = other RNA
ctcgcgctactctctctttcgtttaagagctagaaatagcaagtttaaataaggctagtccgttatcagcgtgaaaacgcggcaccgagtcggtgccaggccagattattaaagagagagtagcgcg

SEQ ID NO: 86 - RNA, 131 nt, synthetic construct
  misc_feature 1..131: note = Synthetic
  source 1..131: mol_type = other RNA
ctcgcgctactctctctttcgtttaagagctagaaatagcaagtttaaataaggctagtccgttatcagcgtgaaaacgcggcaccgagtcggtgccctccaggccagattattaaagagagagtagcgcg

SEQ ID NO: 87 - RNA, 135 nt, synthetic construct
  misc_feature 1..135: note = Synthetic
  source 1..135: mol_type = other RNA
ctcgcgctactctctctttcgtttaagagctagaaatagcaagtttaaataaggctagtccgttatcagcgtgaaaacgcggcaccgagtcggtgcatagcctccaggccagattattaaagagagagtagcgcg

SEQ ID NO: 88 - RNA, 20 nt, synthetic construct
  misc_feature 1..20: note = Synthetic
  source 1..20: mol_type = other RNA
gctactctctctttctggcc

SEQ ID NO: 89 - RNA, 19 nt, synthetic construct
  misc_feature 1..19: note = Synthetic
  source 1..19: mol_type = other RNA
ctactctctctttctggcc

SEQ ID NO: 90 - RNA, 18 nt, synthetic construct
  misc_feature 1..18: note = Synthetic
  source 1..18: mol_type = other RNA
tactctctctttctggcc

SEQ ID NO: 91 - RNA, 17 nt, synthetic construct
  misc_feature 1..17: note = Synthetic
  source 1..17: mol_type = other RNA
actctctctttctggcc

SEQ ID NO: 92-96 - skipped (5 entries)

SEQ ID NO: 97 - RNA, 10 nt, synthetic construct
  misc_feature 1..10: note = Synthetic
  source 1..10: mol_type = other RNA
cagaaagaga

SEQ ID NO: 98 - RNA, 11 nt, synthetic construct
  misc_feature 1..11: note = Synthetic
  source 1..11: mol_type = other RNA
cagaaagagag

SEQ ID NO: 99 - RNA, 12 nt, synthetic construct
  misc_feature 1..12: note = Synthetic
  source 1..12: mol_type = other RNA
cagaaagagaga

SEQ ID NO: 100 - RNA, 13 nt, synthetic construct
  misc_feature 1..13: note = Synthetic
  source 1..13: mol_type = other RNA
cagaaagagagag

SEQ ID NO: 101 - RNA, 14 nt, synthetic construct
  misc_feature 1..14: note = Synthetic
  source 1..14: mol_type = other RNA
cagaaagagagagt

SEQ ID NO: 102 - RNA, 15 nt, synthetic construct
  misc_feature 1..15: note = Synthetic
  source 1..15: mol_type = other RNA
cagaaagagagagta

SEQ ID NO: 103 - RNA, 16 nt, synthetic construct
  misc_feature 1..16: note = Synthetic
  source 1..16: mol_type = other RNA
cagaaagagagagtag

SEQ ID NO: 104 - RNA, 17 nt, synthetic construct
  misc_feature 1..17: note = Synthetic
  source 1..17: mol_type = other RNA
cagaaagagagagtagc

SEQ ID NO: 105 - RNA, 16 nt, synthetic construct
  misc_feature 1..16: note = Synthetic
  source 1..16: mol_type = other RNA
gcctccagttattagc

SEQ ID NO: 106 - RNA, 20 nt, synthetic construct
  misc_feature 1..20: note = Synthetic
  source 1..20: mol_type = other RNA
gatagcctccagttattagc

SEQ ID NO: 107 - RNA, 24 nt, synthetic construct
  misc_feature 1..24: note = Synthetic
  source 1..24: mol_type = other RNA
gctggatagcctccagttattagc

SEQ ID NO: 108 - RNA, 121 nt, synthetic construct
  misc_feature 1..121: note = Synthetic
  source 1..121: mol_type = other RNA
gctactctctctttctggccgtttaagagctagaaatagcaagtttaaataaggctagtccgttatcagcgtgaaaacgcggcaccgagtcggtgcgcctccagttattagccagaaagag

SEQ ID NO: 109 - RNA, 125 nt, synthetic construct
  misc_feature 1..125: note = Synthetic
  source 1..125: mol_type = other RNA
gctactctctctttctggccgtttaagagctagaaatagcaagtttaaataaggctagtccgttatcagcgtgaaaacgcggcaccgagtcggtgcgatagcctccagttattagccagaaagag

SEQ ID NO: 110 - RNA, 129 nt, synthetic construct
  misc_feature 1..129: note = Synthetic
  source 1..129: mol_type = other RNA
gctactctctctttctggccgtttaagagctagaaatagcaagtttaaataaggctagtccgttatcagcgtgaaaacgcggcaccgagtcggtgcgctggatagcctccagttattagccagaaagag

SEQ ID NO: 111 - RNA, 124 nt, synthetic construct
  misc_feature 1..124: note = Synthetic
  source 1..124: mol_type = other RNA
gctactctctctttctggccgtttaagagctagaaatagcaagtttaaataaggctagtccgttatcagcgtgaaaacgcggcaccgagtcggtgcgcctccagttattagccagaaagagaga

SEQ ID NO: 112 - RNA, 128 nt, synthetic construct
  misc_feature 1..128: note = Synthetic
  source 1..128: mol_type = other RNA
gctactctctctttctggccgtttaagagctagaaatagcaagtttaaataaggctagtccgttatcagcgtgaaaacgcggcaccgagtcggtgcgatagcctccagttattagccagaaagagaga

SEQ ID NO: 113 - RNA, 132 nt, synthetic construct
  misc_feature 1..132: note = Synthetic
  source 1..132: mol_type = other RNA
gctactctctctttctggccgtttaagagctagaaatagcaagtttaaataaggctagtccgttatcagcgtgaaaacgcggcaccgagtcggtgcgctggatagcctccagttattagccagaaagagaga

SEQ ID NO: 114 - RNA, 127 nt, synthetic construct
  misc_feature 1..127: note = Synthetic
  source 1..127: mol_type = other RNA
gctactctctctttctggccgtttaagagctagaaatagcaagtttaaataaggctagtccgttatcagcgtgaaaacgcggcaccgagtcggtgcgcctccagttattagccagaaagagagagta

SEQ ID NO: 115 - RNA, 131 nt, synthetic construct
  misc_feature 1..131: note = Synthetic
  source 1..131: mol_type = other RNA
gctactctctctttctggccgtttaagagctagaaatagcaagtttaaataaggctagtccgttatcagcgtgaaaacgcggcaccgagtcggtgcgatagcctccagttattagccagaaagagagagta

SEQ ID NO: 116 - RNA, 135 nt, synthetic construct
  misc_feature 1..135: note = Synthetic
  source 1..135: mol_type = other RNA
gctactctctctttctggccgtttaagagctagaaatagcaagtttaaataaggctagtccgttatcagcgtgaaaacgcggcaccgagtcggtgcgctggatagcctccagttattagccagaaagagagagta

SEQ ID NO: 117 - RNA, 20 nt, synthetic construct
  misc_feature 1..20: note = Synthetic
  source 1..20: mol_type = other RNA
ttcctgaagctgacagcatt

SEQ ID NO: 118 - RNA, 19 nt, synthetic construct
  misc_feature 1..19: note = Synthetic
  source 1..19: mol_type = other RNA
tcctgaagctgacagcatt

SEQ ID NO: 119 - RNA, 18 nt, synthetic construct
  misc_feature 1..18: note = Synthetic
  source 1..18: mol_type = other RNA
cctgaagctgacagcatt

SEQ ID NO: 120 - RNA, 17 nt, synthetic construct
  misc_feature 1..17: note = Synthetic
  source 1..17: mol_type = other RNA
ctgaagctgacagcatt

SEQ ID NO: 121-125 - skipped (5 entries)

SEQ ID NO: 126 - RNA, 10 nt, synthetic construct
  misc_feature 1..10: note = Synthetic
  source 1..10: mol_type = other RNA
gctgtcagct

SEQ ID NO: 127 - RNA, 11 nt, synthetic construct
  misc_feature 1..11: note = Synthetic
  source 1..11: mol_type = other RNA
gctgtcagctt

SEQ ID NO: 128 - RNA, 12 nt, synthetic construct
  misc_feature 1..12: note = Synthetic
  source 1..12: mol_type = other RNA
gctgtcagcttc

SEQ ID NO: 129 - RNA, 13 nt, synthetic construct
  misc_feature 1..13: note = Synthetic
  source 1..13: mol_type = other RNA
gctgtcagcttca

SEQ ID NO: 130 - RNA, 14 nt, synthetic construct
  misc_feature 1..14: note = Synthetic
  source 1..14: mol_type = other RNA
gctgtcagcttcag

SEQ ID NO: 131 - RNA, 15 nt, synthetic construct
  misc_feature 1..15: note = Synthetic
  source 1..15: mol_type = other RNA
gctgtcagcttcagg

SEQ ID NO: 132 - RNA, 16 nt, synthetic construct
  misc_feature 1..16: note = Synthetic
  source 1..16: mol_type = other RNA
gctgtcagcttcagga

SEQ ID NO: 133 - RNA, 17 nt, synthetic construct
  misc_feature 1..17: note = Synthetic
  source 1..17: mol_type = other RNA
gctgtcagcttcaggaa

SEQ ID NO: 134 - RNA, 24 nt, synthetic construct
  misc_feature 1..24: note = Synthetic
  source 1..24: mol_type = other RNA
agattattacatctcggcccgaat

SEQ ID NO: 135 - RNA, 28 nt, synthetic construct
  misc_feature 1..28: note = Synthetic
  source 1..28: mol_type = other RNA
agcgagattattacatctcggcccgaat

SEQ ID NO: 136 - RNA, 32 nt, synthetic construct
  misc_feature 1..32: note = Synthetic
  source 1..32: mol_type = other RNA
acggagcgagattattacatctcggcccgaat

SEQ ID NO: 137 - RNA, 129 nt, synthetic construct
  misc_feature 1..129: note = Synthetic
  source 1..129: mol_type = other RNA
ttcctgaagctgacagcattgtttaagagctagaaatagcaagtttaaataaggctagtccgttatcagcgtgaaaacgcggcaccgagtcggtgcagattattacatctcggcccgaatgctgtcagc

SEQ ID NO: 138 - RNA, 133 nt, synthetic construct
  misc_feature 1..133: note = Synthetic
  source 1..133: mol_type = other RNA
ttcctgaagctgacagcattgtttaagagctagaaatagcaagtttaaataaggctagtccgttatcagcgtgaaaacgcggcaccgagtcggtgcagcgagattattacatctcggcccgaatgctgtcagc

SEQ ID NO: 139 - RNA, 137 nt, synthetic construct
  misc_feature 1..137: note = Synthetic
  source 1..137: mol_type = other RNA
ttcctgaagctgacagcattgtttaagagctagaaatagcaagtttaaataaggctagtccgttatcagcgtgaaaacgcggcaccgagtcggtgcacggagcgagattattacatctcggcccgaatgctgtcagc

SEQ ID NO: 140 - RNA, 132 nt, synthetic construct
  misc_feature 1..132: note = Synthetic
  source 1..132: mol_type = other RNA
ttcctgaagctgacagcattgtttaagagctagaaatagcaagtttaaataaggctagtccgttatcagcgtgaaaacgcggcaccgagtcggtgcagattattacatctcggcccgaatgctgtcagcttc

SEQ ID NO: 141 - RNA, 136 nt, synthetic construct
  misc_feature 1..136: note = Synthetic
  source 1..136: mol_type = other RNA
ttcctgaagctgacagcattgtttaagagctagaaatagcaagtttaaataaggctagtccgttatcagcgtgaaaacgcggcaccgagtcggtgcagcgagattattacatctcggcccgaatgctgtcagcttc

SEQ ID NO: 142 - RNA, 140 nt, synthetic construct
  misc_feature 1..140: note = Synthetic
  source 1..140: mol_type = other RNA
ttcctgaagctgacagcattgtttaagagctagaaatagcaagtttaaataaggctagtccgttatcagcgtgaaaacgcggcaccgagtcggtgcacggagcgagattattacatctcggcccgaatgctgtcagcttc

SEQ ID NO: 143 - RNA, 135 nt, synthetic construct
  misc_feature 1..135: note = Synthetic
  source 1..135: mol_type = other RNA
ttcctgaagctgacagcattgtttaagagctagaaatagcaagtttaaataaggctagtccgttatcagcgtgaaaacgcggcaccgagtcggtgcagattattacatctcggcccgaatgctgtcagcttcagg

SEQ ID NO: 144 - RNA, 139 nt, synthetic construct
  misc_feature 1..139: note = Synthetic
  source 1..139: mol_type = other RNA
ttcctgaagctgacagcattgtttaagagctagaaatagcaagtttaaataaggctagtccgttatcagcgtgaaaacgcggcaccgagtcggtgcagcgagattattacatctcggcccgaatgctgtcagcttcagg

SEQ ID NO: 145 - RNA, 143 nt, synthetic construct
  misc_feature 1..143: note = Synthetic
  source 1..143: mol_type = other RNA
ttcctgaagctgacagcattgtttaagagctagaaatagcaagtttaaataaggctagtccgttatcagcgtgaaaacgcggcaccgagtcggtgcacggagcgagattattacatctcggcccgaatgctgtcagcttcagg

SEQ ID NO: 146 - RNA, 20 nt, synthetic construct
  misc_feature 1..20: note = Synthetic
  source 1..20: mol_type = other RNA
tcctgaagctgacagcattc

SEQ ID NO: 147 - RNA, 19 nt, synthetic construct
  misc_feature 1..19: note = Synthetic
  source 1..19: mol_type = other RNA
cctgaagctgacagcattc

SEQ ID NO: 148 - RNA, 18 nt, synthetic construct
  misc_feature 1..18: note = Synthetic
  source 1..18: mol_type = other RNA
ctgaagctgacagcattc

SEQ ID NO: 149 - RNA, 17 nt, synthetic construct
  misc_feature 1..17: note = Synthetic
  source 1..17: mol_type = other RNA
tgaagctgacagcattc

SEQ ID NO: 150-154 - skipped (5 entries)

SEQ ID NO: 155 - RNA, 10 nt, synthetic construct
  misc_feature 1..10: note = Synthetic
  source 1..10: mol_type = other RNA
tgctgtcagc

SEQ ID NO: 156 - RNA, 11 nt, synthetic construct
  misc_feature 1..11: note = Synthetic
  source 1..11: mol_type = other RNA
tgctgtcagct

SEQ ID NO: 157 - RNA, 12 nt, synthetic construct
  misc_feature 1..12: note = Synthetic
  source 1..12: mol_type = other RNA
tgctgtcagctt

SEQ ID NO: 158 - RNA, 13 nt, synthetic construct
  misc_feature 1..13: note = Synthetic
  source 1..13: mol_type = other RNA
tgctgtcagcttc

SEQ ID NO: 159 - RNA, 14 nt, synthetic construct
  misc_feature 1..14: note = Synthetic
  source 1..14: mol_type = other RNA
tgctgtcagcttca

SEQ ID NO: 160 - RNA, 15 nt, synthetic construct
  misc_feature 1..15: note = Synthetic
  source 1..15: mol_type = other RNA
tgctgtcagcttcag

SEQ ID NO: 161 - RNA, 16 nt, synthetic construct
  misc_feature 1..16: note = Synthetic
  source 1..16: mol_type = other RNA
tgctgtcagcttcagg

SEQ ID NO: 162 - RNA, 17 nt, synthetic construct
  misc_feature 1..17: note = Synthetic
  source 1..17: mol_type = other RNA
tgctgtcagcttcagga

SEQ ID NO: 163 - RNA, 23 nt, synthetic construct
  misc_feature 1..23: note = Synthetic
  source 1..23: mol_type = other RNA
agattattacatctcggcccgaa

SEQ ID NO: 164 - RNA, 27 nt, synthetic construct
  misc_feature 1..27: note = Synthetic
  source 1..27: mol_type = other RNA
agcgagattattacatctcggcccgaa

SEQ ID NO: 165 - RNA, 31 nt, synthetic construct
  misc_feature 1..31: note = Synthetic
  source 1..31: mol_type = other RNA
acggagcgagattattacatctcggcccgaa

SEQ ID NO: 166 - RNA, 128 nt, synthetic construct
  misc_feature 1..128: note = Synthetic
  source 1..128: mol_type = other RNA
tcctgaagctgacagcattcgtttaagagctagaaatagcaagtttaaataaggctagtccgttatcagcgtgaaaacgcggcaccgagtcggtgcagattattacatctcggcccgaatgctgtcag

SEQ ID NO: 167 - RNA, 132 nt, synthetic construct
  misc_feature 1..132: note = Synthetic
  source 1..132: mol_type = other RNA
tcctgaagctgacagcattcgtttaagagctagaaatagcaagtttaaataaggctagtccgttatcagcgtgaaaacgcggcaccgagtcggtgcagcgagattattacatctcggcccgaatgctgtcag

SEQ ID NO: 168 - RNA, 136 nt, synthetic construct
  misc_feature 1..136: note = Synthetic
  source 1..136: mol_type = other RNA
tcctgaagctgacagcattcgtttaagagctagaaatagcaagtttaaataaggctagtccgttatcagcgtgaaaacgcggcaccgagtcggtgcacggagcgagattattacatctcggcccgaatgctgtcag

SEQ ID NO: 169 - RNA, 131 nt, synthetic construct
  misc_feature 1..131: note = Synthetic
  source 1..131: mol_type = other RNA
tcctgaagctgacagcattcgtttaagagctagaaatagcaagtttaaataaggctagtccgttatcagcgtgaaaacgcggcaccgagtcggtgcagattattacatctcggcccgaatgctgtcagctt

SEQ ID NO: 170 - RNA, 135 nt, synthetic construct
  misc_feature 1..135: note = Synthetic
  source 1..135: mol_type = other RNA
tcctgaagctgacagcattcgtttaagagctagaaatagcaagtttaaataaggctagtccgttatcagcgtgaaaacgcggcaccgagtcggtgcagcgagattattacatctcggcccgaatgctgtcagctt

SEQ ID NO: 171 - RNA, 139 nt, synthetic construct
  misc_feature 1..139: note = Synthetic
  source 1..139: mol_type = other RNA
tcctgaagctgacagcattcgtttaagagctagaaatagcaagtttaaataaggctagtccgttatcagcgtgaaaacgcggcaccgagtcggtgcacggagcgagattattacatctcggcccgaatgctgtcagctt

SEQ ID NO: 172 - RNA, 134 nt, synthetic construct
  misc_feature 1..134: note = Synthetic
  source 1..134: mol_type = other RNA
tcctgaagctgacagcattcgtttaagagctagaaatagcaagtttaaataaggctagtccgttatcagcgtgaaaacgcggcaccgagtcggtgcagattattacatctcggcccgaatgctgtcagcttcag

SEQ ID NO: 173 - RNA, 138 nt, synthetic construct
  misc_feature 1..138: note = Synthetic
  source 1..138: mol_type = other RNA
tcctgaagctgacagcattcgtttaagagctagaaatagcaagtttaaataaggctagtccgttatcagcgtgaaaacgcggcaccgagtcggtgcagcgagattattacatctcggcccgaatgctgtcagcttcag

SEQ ID NO: 174 - RNA, 142 nt, synthetic construct
  misc_feature 1..142: note = Synthetic
  source 1..142: mol_type = other RNA
tcctgaagctgacagcattcgtttaagagctagaaatagcaagtttaaataaggctagtccgttatcagcgtgaaaacgcggcaccgagtcggtgcacggagcgagattattacatctcggcccgaatgctgtcagcttcag

SEQ ID NO: 175 - RNA, 20 nt, synthetic construct
  misc_feature 1..20: note = Synthetic
  source 1..20: mol_type = other RNA
aaggaccagagcgggagggt

SEQ ID NO: 176 - RNA, 19 nt, synthetic construct
  misc_feature 1..19: note = Synthetic
  source 1..19: mol_type = other RNA
aggaccagagcgggagggt

SEQ ID NO: 177 - RNA, 18 nt, synthetic construct
  misc_feature 1..18: note = Synthetic
  source 1..18: mol_type = other RNA
ggaccagagcgggagggt

SEQ ID NO: 178 - RNA, 17 nt, synthetic construct
  misc_feature 1..17: note = Synthetic
  source 1..17: mol_type = other RNA
gaccagagcgggagggt

SEQ ID NO: 179-183 - skipped (5 entries)

SEQ ID NO: 184 - RNA, 10 nt, synthetic construct
  misc_feature 1..10: note = Synthetic
  source 1..10: mol_type = other RNA
ctcccgctct

SEQ ID NO: 185 - RNA, 11 nt, synthetic construct
  misc_feature 1..11: note = Synthetic
  source 1..11: mol_type = other RNA
ctcccgctctg

SEQ ID NO: 186 - RNA, 12 nt, synthetic construct
  misc_feature 1..12: note = Synthetic
  source 1..12: mol_type = other RNA
ctcccgctctgg

SEQ ID NO: 187 - RNA, 13 nt, synthetic construct
  misc_feature 1..13: note = Synthetic
  source 1..13: mol_type = other RNA
ctcccgctctggt

SEQ ID NO: 188 - RNA, 14 nt, synthetic construct
  misc_feature 1..14: note = Synthetic
  source 1..14: mol_type = other RNA
ctcccgctctggtc

SEQ ID NO: 189 - RNA, 15 nt, synthetic construct
  misc_feature 1..15: note = Synthetic
  source 1..15: mol_type = other RNA
ctcccgctctggtcc

SEQ ID NO: 190 - RNA, 16 nt, synthetic construct
  misc_feature 1..16: note = Synthetic
  source 1..16: mol_type = other RNA
ctcccgctctggtcct

SEQ ID NO: 191 - RNA, 17 nt, synthetic construct
  misc_feature 1..17: note = Synthetic
  source 1..17: mol_type = other RNA
ctcccgctctggtcctt

SEQ ID NO: 192 - RNA, 26 nt, synthetic construct
  misc_feature 1..26: note = Synthetic
  source 1..26: mol_type = other RNA
cagtaataacgtgagtctctcctacc

SEQ ID NO: 193 - RNA, 30 nt, synthetic construct
  misc_feature 1..30: note = Synthetic
  source 1..30: mol_type = other RNA
tatccagtaataacgtgagtctctcctacc

SEQ ID NO: 194 - RNA, 34 nt, synthetic construct
  misc_feature 1..34: note = Synthetic
  source 1..34: mol_type = other RNA
aggctatccagtaataacgtgagtctctcctacc

SEQ ID NO: 195 - RNA, 131 nt, synthetic construct
  misc_feature 1..131: note = Synthetic
  source 1..131: mol_type = other RNA
aaggaccagagcgggagggtgtttaagagctagaaatagcaagtttaaataaggctagtccgttatcagcgtgaaaacgcggcaccgagtcggtgccagtaataacgtgagtctctcctaccctcccgctc

SEQ ID NO: 196 - RNA, 135 nt, synthetic construct
  misc_feature 1..135: note = Synthetic
  source 1..135: mol_type = other RNA
aaggaccagagcgggagggtgtttaagagctagaaatagcaagtttaaataaggctagtccgttatcagcgtgaaaacgcggcaccgagtcggtgctatccagtaataacgtgagtctctcctaccctcccgctc

SEQ ID NO: 197 - RNA, 139 nt, synthetic construct
  misc_feature 1..139: note = Synthetic
  source 1..139: mol_type = other RNA
aaggaccagagcgggagggtgtttaagagctagaaatagcaagtttaaataaggctagtccgttatcagcgtgaaaacgcggcaccgagtcggtgcaggctatccagtaataacgtgagtctctcctaccctcccgctc

SEQ ID NO: 198 - RNA, 134 nt, synthetic construct
  misc_feature 1..134: note = Synthetic
  source 1..134: mol_type = other RNA
aaggaccagagcgggagggtgtttaagagctagaaatagcaagtttaaataaggctagtccgttatcagcgtgaaaacgcggcaccgagtcggtgccagtaataacgtgagtctctcctaccctcccgctctgg

SEQ ID NO: 199 - RNA, 138 nt, synthetic construct
  misc_feature 1..138: note = Synthetic
  source 1..138: mol_type = other RNA
aaggaccagagcgggagggtgtttaagagctagaaatagcaagtttaaataaggctagtccgttatcagcgtgaaaacgcggcaccgagtcggtgctatccagtaataacgtgagtctctcctaccctcccgctctgg

SEQ ID NO: 200 - RNA, 137 nt, synthetic construct
  misc_feature 1..137: note = Synthetic
  source 1..137: mol_type = other RNA
aaggaccagagcgggagggtgtttaagagctagaaatagcaagtttaaataaggctagtccgttatcagcgtgaaaacgcggcaccgagtcggtgccagtaataacgtgagtctctcctaccctcccgctctggtcc

SEQ ID NO: 201 - RNA, 141 nt, synthetic construct
  misc_feature 1..141: note = Synthetic
  source 1..141: mol_type = other RNA
aaggaccagagcgggagggtgtttaagagctagaaatagcaagtttaaataaggctagtccgttatcagcgtgaaaacgcggcaccgagtcggtgctatccagtaataacgtgagtctctcctaccctcccgctctggtcc

SEQ ID NO: 202 - RNA, 20 nt, synthetic construct
  misc_feature 1..20: note = Synthetic
  source 1..20: mol_type = other RNA
actcacgctggatagcctcc

SEQ ID NO: 203 - RNA, 19 nt, synthetic construct
  misc_feature 1..19: note = Synthetic
  source 1..19: mol_type = other RNA
ctcacgctggatagcctcc

SEQ ID NO: 204 - RNA, 18 nt, synthetic construct
  misc_feature 1..18: note = Synthetic
  source 1..18: mol_type = other RNA
tcacgctggatagcctcc

SEQ ID NO: 205 - RNA, 17 nt, synthetic construct
  misc_feature 1..17: note = Synthetic
  source 1..17: mol_type = other RNA
cacgctggatagcctcc

SEQ ID NO: 206-210 - skipped (5 entries)

SEQ ID NO: 211 - RNA, 10 nt, synthetic construct
  misc_feature 1..10: note = Synthetic
  source 1..10: mol_type = other RNA
ggctatccag

SEQ ID NO: 212 - RNA, 11 nt, synthetic construct
  misc_feature 1..11: note = Synthetic
  source 1..11: mol_type = other RNA
ggctatccagc

SEQ ID NO: 213 - RNA, 12 nt, synthetic construct
  misc_feature 1..12: note = Synthetic
  source 1..12: mol_type = other RNA
ggctatccagcg

SEQ ID NO: 214 - RNA, 13 nt, synthetic construct
  misc_feature 1..13: note = Synthetic
  source 1..13: mol_type = other RNA
ggctatccagcgt

SEQ ID NO: 215 - RNA, 14 nt, synthetic construct
  misc_feature 1..14: note = Synthetic
  source 1..14: mol_type = other RNA
ggctatccagcgtg

SEQ ID NO: 216 - RNA, 15 nt, synthetic construct
  misc_feature 1..15: note = Synthetic
  source 1..15: mol_type = other RNA
ggctatccagcgtga

SEQ ID NO: 217 - RNA, 16 nt, synthetic construct
  misc_feature 1..16: note = Synthetic
  source 1..16: mol_type = other RNA
ggctatccagcgtgag

SEQ ID NO: 218 - RNA, 17 nt, synthetic construct
  misc_feature 1..17: note = Synthetic
  source 1..17: mol_type = other RNA
ggctatccagcgtgagt

SEQ ID NO: 219 - RNA, 16 nt, synthetic construct
  misc_feature 1..16: note = Synthetic
  source 1..16: mol_type = other RNA
ctggcctgtaataaga

SEQ ID NO: 220 - RNA, 20 nt, synthetic construct
  misc_feature 1..20: note = Synthetic
  source 1..20: mol_type = other RNA
ctttctggcctgtaataaga

SEQ ID NO: 221 - RNA, 24 nt, synthetic construct
  misc_feature 1..24: note = Synthetic
  source 1..24: mol_type = other RNA
ctctctttctggcctgtaataaga

SEQ ID NO: 222 - RNA, 16 nt, synthetic construct
  misc_feature 1..16: note = Synthetic
  source 1..16: mol_type = other RNA
tctctttctggctgga

SEQ ID NO: 223 - RNA, 10 nt, synthetic construct
  misc_feature 1..10: note = Synthetic
  source 1..10: mol_type = other RNA
tctggctgga

SEQ ID NO: 224 - RNA, 12 nt, synthetic construct
  misc_feature 1..12: note = Synthetic
  source 1..12: mol_type = other RNA
tttctggctgga

SEQ ID NO: 225 - RNA, 14 nt, synthetic construct
  misc_feature 1..14: note = Synthetic
  source 1..14: mol_type = other RNA
tctttctggctgga

SEQ ID NO: 226 - RNA, 18 nt, synthetic construct
  misc_feature 1..18: note = Synthetic
  source 1..18: mol_type = other RNA
tctctctttctggctgga

SEQ ID NO: 227 - RNA, 20 nt, synthetic construct
  misc_feature 1..20: note = Synthetic
  source 1..20: mol_type = other RNA
actctctctttctggctgga

SEQ ID NO: 228 - RNA, 11 nt, synthetic construct
  misc_feature 1..11: note = Synthetic
  source 1..11: mol_type = other RNA
ctgggcctgga

SEQ ID NO: 229 - RNA, 13 nt, synthetic construct
  misc_feature 1..13: note = Synthetic
  source 1..13: mol_type = other RNA
ttctgggcctgga

SEQ ID NO: 230 - RNA, 15 nt, synthetic construct
  misc_feature 1..15: note = Synthetic
  source 1..15: mol_type = other RNA
ctttctgggcctgga

SEQ ID NO: 231 - RNA, 17 nt, synthetic construct
  misc_feature 1..17: note = Synthetic
  source 1..17: mol_type = other RNA
ctctttctgggcctgga

SEQ ID NO: 232 - RNA, 128 nt, synthetic construct
  misc_feature 1..128: note = Synthetic
  source 1..128: mol_type = other RNA
actcacgctggatagcctccgttttagagctagaaatagcaagttaaaataaggctagtccgttatcaacttgaaaaagtggcaccgagtcggtgctctctttctggctggaggctatccagcgtttt

SEQ ID NO: 233 - RNA, 122 nt, synthetic construct
  misc_feature 1..122: note = Synthetic
  source 1..122: mol_type = other RNA
actcacgctggatagcctccgttttagagctagaaatagcaagttaaaataaggctagtccgttatcaacttgaaaaagtggcaccgagtcggtgctctggctggaggctatccagcgtttt

SEQ ID NO: 234 - RNA, 124 nt, synthetic construct
  misc_feature 1..124: note = Synthetic
  source 1..124: mol_type = other RNA
actcacgctggatagcctccgttttagagctagaaatagcaagttaaaataaggctagtccgttatcaacttgaaaaagtggcaccgagtcggtgctttctggctggaggctatccagcgtttt

SEQ ID NO: 235 - RNA, 126 nt, synthetic construct
  misc_feature 1..126: note = Synthetic
  source 1..126: mol_type = other RNA
actcacgctggatagcctccgttttagagctagaaatagcaagttaaaataaggctagtccgttatcaacttgaaaaagtggcaccgagtcggtgctctttctggctggaggctatccagcgtttt

SEQ ID NO: 236 - RNA, 130 nt, synthetic construct
  misc_feature 1..130: note = Synthetic
  source 1..130: mol_type = other RNA
actcacgctggatagcctccgttttagagctagaaatagcaagttaaaataaggctagtccgttatcaacttgaaaaagtggcaccgagtcggtgctctctctttctggctggaggctatccagcgtttt

SEQ ID NO: 237 - RNA, 132 nt, synthetic construct
  misc_feature 1..132: note = Synthetic
  source 1..132: mol_type = other RNA
actcacgctggatagcctccgttttagagctagaaatagcaagttaaaataaggctagtccgttatcaacttgaaaaagtggcaccgagtcggtgcactctctctttctggctggaggctatccagcgtttt

SEQ ID NO: 238 - RNA, 127 nt, synthetic construct
  misc_feature 1..127: note = Synthetic
  source 1..127: mol_type = other RNA
actcacgctggatagcctccgttttagagctagaaatagcaagttaaaataaggctagtccgttatcaacttgaaaaagtggcaccgagtcggtgcctttctgggcctggaggctatccagcgtttt

SEQ ID NO: 239 - RNA, 119 nt, synthetic construct
  misc_feature 1..119: note = Synthetic
  source 1..119: mol_type = other RNA
actcacgctggatagcctccgttttagagctagaaatagcaagttaaaataaggctagtccgttatcaacttgaaaaagtggcaccgagtcggtgcctgggcctggaggctatcctttt

SEQ ID NO: 240 - RNA, 121 nt, synthetic construct
  misc_feature 1..121: note = Synthetic
  source 1..121: mol_type = other RNA
actcacgctggatagcctccgttttagagctagaaatagcaagttaaaataaggctagtccgttatcaacttgaaaaagtggcaccgagtcggtgcttctgggcctggaggctatcctttt

SEQ ID NO: 241 - RNA, 123 nt, synthetic construct
  misc_feature 1..123: note = Synthetic
  source 1..123: mol_type = other RNA
actcacgctggatagcctccgttttagagctagaaatagcaagttaaaataaggctagtccgttatcaacttgaaaaagtggcaccgagtcggtgcctttctgggcctggaggctatcctttt

SEQ ID NO: 242 - RNA, 125 nt, synthetic construct
  misc_feature 1..125: note = Synthetic
  source 1..125: mol_type = other RNA
actcacgctggatagcctccgttttagagctagaaatagcaagttaaaataaggctagtccgttatcaacttgaaaaagtggcaccgagtcggtgcctctttctgggcctggaggctatcctttt

SEQ ID NO: 243 - RNA, 121 nt, synthetic construct
  misc_feature 1..121: note = Synthetic
  source 1..121: mol_type = other RNA
actcacgctggatagcctccgttttagagctagaaatagcaagttaaaataaggctagtccgttatcaacttgaaaaagtggcaccgagtcggtgcctgggcctggaggctatccagtttt

SEQ ID NO: 244 - RNA, 123 nt, synthetic construct
  misc_feature 1..123: note = Synthetic
  source 1..123: mol_type = other RNA
actcacgctggatagcctccgttttagagctagaaatagcaagttaaaataaggctagtccgttatcaacttgaaaaagtggcaccgagtcggtgcttctgggcctggaggctatccagtttt

SEQ ID NO: 245 - RNA, 125 nt, synthetic construct
  misc_feature 1..125: note = Synthetic
  source 1..125: mol_type = other RNA
actcacgctggatagcctccgttttagagctagaaatagcaagttaaaataaggctagtccgttatcaacttgaaaaagtggcaccgagtcggtgcctttctgggcctggaggctatccagtttt

SEQ ID NO: 246 - RNA, 127 nt, synthetic construct
  misc_feature 1..127: note = Synthetic
  source 1..127: mol_type = other RNA
actcacgctggatagcctccgttttagagctagaaatagcaagttaaaataaggctagtccgttatcaacttgaaaaagtggcaccgagtcggtgcctctttctgggcctggaggctatccagtttt

SEQ ID NO: 247 - RNA, 123 nt, synthetic construct
  misc_feature 1..123: note = Synthetic
  source 1..123: mol_type = other RNA
actcacgctggatagcctccgttttagagctagaaatagcaagttaaaataaggctagtccgttatcaacttgaaaaagtggcaccgagtcggtgcctgggcctggaggctatccagcgtttt

SEQ ID NO: 248 - RNA, 125 nt, synthetic construct
  misc_feature 1..125: note = Synthetic
  source 1..125: mol_type = other RNA
actcacgctggatagcctccgttttagagctagaaatagcaagttaaaataaggctagtccgttatcaacttgaaaaagtggcaccgagtcggtgcttctgggcctggaggctatccagcgtttt

SEQ ID NO: 249 - RNA, 129 nt, synthetic construct
  misc_feature 1..129: note = Synthetic
  source 1..129: mol_type = other RNA
actcacgctggatagcctccgttttagagctagaaatagcaagttaaaataaggctagtccgttatcaacttgaaaaagtggcaccgagtcggtgcctctttctgggcctggaggctatccagcgtttt

SEQ ID NO: 250 - RNA, 125 nt, synthetic construct
  misc_feature 1..125: note = Synthetic
  source 1..125: mol_type = other RNA
actcacgctggatagcctccgttttagagctagaaatagcaagttaaaataaggctagtccgttatcaacttgaaaaagtggcaccgagtcggtgcctgggcctggaggctatccagcgtgtttt

SEQ ID NO: 251 - RNA, 127 nt, synthetic construct
  misc_feature 1..127: note = Synthetic
  source 1..127: mol_type = other RNA
actcacgctggatagcctccgttttagagctagaaatagcaagttaaaataaggctagtccgttatcaacttgaaaaagtggcaccgagtcggtgcttctgggcctggaggctatccagcgtgtttt

SEQ ID NO: 252 - RNA, 129 nt, synthetic construct
  misc_feature 1..129: note = Synthetic
  source 1..129: mol_type = other RNA
actcacgctggatagcctccgttttagagctagaaatagcaagttaaaataaggctagtccgttatcaacttgaaaaagtggcaccgagtcggtgcctttctgggcctggaggctatccagcgtgtttt

SEQ ID NO: 253 - RNA, 131 nt, synthetic construct
  misc_feature 1..131: note = Synthetic
  source 1..131: mol_type = other RNA
actcacgctggatagcctccgttttagagctagaaatagcaagttaaaataaggctagtccgttatcaacttgaaaaagtggcaccgagtcggtgcctctttctgggcctggaggctatccagcgtgtttt

SEQ ID NO: 254 - RNA, 121 nt, synthetic construct
  misc_feature 1..121: note = Synthetic
  source 1..121: mol_type = other RNA
actcacgctggatagcctccgtttaagagctagaaatagcaagtttaaataaggctagtccgttatcagcgtgaaaacgcggcaccgagtcggtgcctggcctgtaataagaggctatcca

SEQ ID NO: 255 - RNA, 125 nt, synthetic construct
  misc_feature 1..125: note = Synthetic
  source 1..125: mol_type = other RNA
actcacgctggatagcctccgtttaagagctagaaatagcaagtttaaataaggctagtccgttatcagcgtgaaaacgcggcaccgagtcggtgcctttctggcctgtaataagaggctatcca

SEQ ID NO: 256 - RNA, 129 nt, synthetic construct
  misc_feature 1..129: note = Synthetic
  source 1..129: mol_type = other RNA
actcacgctggatagcctccgtttaagagctagaaatagcaagtttaaataaggctagtccgttatcagcgtgaaaacgcggcaccgagtcggtgcctctctttctggcctgtaataagaggctatcca

SEQ ID NO: 257 - RNA, 124 nt, synthetic construct
  misc_feature 1..124: note = Synthetic
  source 1..124: mol_type = other RNA
actcacgctggatagcctccgtttaagagctagaaatagcaagtttaaataaggctagtccgttatcagcgtgaaaacgcggcaccgagtcggtgcctggcctgtaataagaggctatccagcg

SEQ ID NO: 258 - RNA, 128 nt, synthetic construct
  misc_feature 1..128: note = Synthetic
  source 1..128: mol_type = other RNA
actcacgctggatagcctccgtttaagagctagaaatagcaagtttaaataaggctagtccgttatcagcgtgaaaacgcggcaccgagtcggtgcctttctggcctgtaataagaggctatccagcg

SEQ ID NO: 259 - RNA, 132 nt, synthetic construct
  misc_feature 1..132: note = Synthetic
  source 1..132: mol_type = other RNA
actcacgctggatagcctccgtttaagagctagaaatagcaagtttaaataaggctagtccgttatcagcgtgaaaacgcggcaccgagtcggtgcctctctttctggcctgtaataagaggctatccagcg

SEQ ID NO: 260 - RNA, 127 nt, synthetic construct
  misc_feature 1..127: note = Synthetic
  source 1..127: mol_type = other RNA
actcacgctggatagcctccgtttaagagctagaaatagcaagtttaaataaggctagtccgttatcagcgtgaaaacgcggcaccgagtcggtgcctggcctgtaataagaggctatccagcgtga

SEQ ID NO: 261 - RNA, 131 nt, synthetic construct
  misc_feature 1..131: note = Synthetic
  source 1..131: mol_type = other RNA
actcacgctggatagcctccgtttaagagctagaaatagcaagtttaaataaggctagtccgttatcagcgtgaaaacgcggcaccgagtcggtgcctttctggcctgtaataagaggctatccagcgtga

SEQ ID NO: 262 - RNA, 135 nt, synthetic construct
  misc_feature 1..135: note = Synthetic
  source 1..135: mol_type = other RNA
actcacgctggatagcctccgtttaagagctagaaatagcaagtttaaataaggctagtccgttatcagcgtgaaaacgcggcaccgagtcggtgcctctctttctggcctgtaataagaggctatccagcgtga

SEQ ID NO: 263 - RNA, 20 nt, synthetic construct
  misc_feature 1..20: note = Synthetic
  source 1..20: mol_type = other RNA
ggccgagatgtctcgctccg

SEQ ID NO: 264 - RNA, 20 nt, synthetic construct
  misc_feature 1..20: note = Synthetic
  source 1..20: mol_type = other RNA
tcctgaagctgacagcattc

SEQ ID NO: 265 - RNA, 20 nt, synthetic construct
  misc_feature 1..20: note = Synthetic
  source 1..20: mol_type = other RNA
ttcctgaagctgacagcatt

SEQ ID NO: 266 - RNA, 20 nt, synthetic construct
  misc_feature 1..20: note = Synthetic
  source 1..20: mol_type = other RNA
tactctctctttctggctgg

SEQ ID NO: 267 - RNA, 20 nt, synthetic construct
  misc_feature 1..20: note = Synthetic
  source 1..20: mol_type = other RNA
ctctctctttctgggcctgg

SEQ ID NO: 268 - RNA, 20 nt, synthetic construct
  misc_feature 1..20: note = Synthetic
  source 1..20: mol_type = other RNA
ctactctctctttctgggcc

SEQ ID NO: 269 - RNA, 20 nt, synthetic construct
  misc_feature 1..20: note = Synthetic
  source 1..20: mol_type = other RNA
gagtagcgcgagcacagcta

SEQ ID NO: 270 - RNA, 19 nt, synthetic construct
  misc_feature 1..19: note = Synthetic
  source 1..19: mol_type = other RNA
agtagcgcgagcacagcta

SEQ ID NO: 271 - RNA, 18 nt, synthetic construct
  misc_feature 1..18: note = Synthetic
  source 1..18: mol_type = other RNA
gtagcgcgagcacagcta

SEQ ID NO: 272 - RNA, 17 nt, synthetic construct
  misc_feature 1..17: note = Synthetic
  source 1..17: mol_type = other RNA
tagcgcgagcacagcta

SEQ ID NO: 273-277 - skipped (5 entries)

SEQ ID NO: 278 - RNA, 10 nt, synthetic construct
  misc_feature 1..10: note = Synthetic
  source 1..10: mol_type = other RNA
ctgtgctcgc

SEQ ID NO: 279 - RNA, 11 nt, synthetic construct
  misc_feature 1..11: note = Synthetic
  source 1..11: mol_type = other RNA
ctgtgctcgcg

SEQ ID NO: 280 - RNA, 12 nt, synthetic construct
  misc_feature 1..12: note = Synthetic
  source 1..12: mol_type = other RNA
ctgtgctcgcgc

SEQ ID NO: 281 - RNA, 13 nt, synthetic construct
  misc_feature 1..13: note = Synthetic
  source 1..13: mol_type = other RNA
ctgtgctcgcgct

SEQ ID NO: 282 - RNA, 14 nt, synthetic construct
  misc_feature 1..14: note = Synthetic
  source 1..14: mol_type = other RNA
ctgtgctcgcgcta

SEQ ID NO: 283 - RNA, 15 nt, synthetic construct
  misc_feature 1..15: note = Synthetic
  source 1..15: mol_type = other RNA
ctgtgctcgcgctac

SEQ ID NO: 284 - RNA, 16 nt, synthetic construct
  misc_feature 1..16: note = Synthetic
  source 1..16: mol_type = other RNA
ctgtgctcgcgctact

SEQ ID NO: 285 - RNA, 17 nt, synthetic construct
  misc_feature 1..17: note = Synthetic
  source 1..17: mol_type = other RNA
ctgtgctcgcgctactc

SEQ ID NO: 286 - RNA, 16 nt, synthetic construct
  misc_feature 1..16: note = Synthetic
  source 1..16: mol_type = other RNA
gtggccttataataag

SEQ ID NO: 287 - RNA, 20 nt, synthetic construct
  misc_feature 1..20: note = Synthetic
  source 1..20: mol_type = other RNA
ctccgtggccttataataag

SEQ ID NO: 288 - RNA, 24 nt, synthetic construct
  misc_feature 1..24: note = Synthetic
  source 1..24: mol_type = other RNA
ctcgctccgtggccttataataag

SEQ ID NO: 289 - RNA, 121 nt, synthetic construct
  misc_feature 1..121: note = Synthetic
  source 1..121: mol_type = other RNA
gagtagcgcgagcacagctagtttaagagctagaaatagcaagtttaaataaggctagtccgttatcagcgtgaaaacgcggcaccgagtcggtgcgtggccttataataagctgtgctcg

SEQ ID NO: 290 - RNA, 125 nt, synthetic construct
  misc_feature 1..125: note = Synthetic
  source 1..125: mol_type = other RNA
gagtagcgcgagcacagctagtttaagagctagaaatagcaagtttaaataaggctagtccgttatcagcgtgaaaacgcggcaccgagtcggtgcctccgtggccttataataagctgtgctcg

SEQ ID NO: 291 - RNA, 129 nt, synthetic construct
  misc_feature 1..129: note = Synthetic
  source 1..129: mol_type = other RNA
gagtagcgcgagcacagctagtttaagagctagaaatagcaagtttaaataaggctagtccgttatcagcgtgaaaacgcggcaccgagtcggtgcctcgctccgtggccttataataagctgtgctcg

SEQ ID NO: 292 - RNA, 124 nt, synthetic construct
  misc_feature 1..124: note = Synthetic
  source 1..124: mol_type = other RNA
gagtagcgcgagcacagctagtttaagagctagaaatagcaagtttaaataaggctagtccgttatcagcgtgaaaacgcggcaccgagtcggtgcgtggccttataataagctgtgctcgcgc

SEQ ID NO: 293 - RNA, 128 nt, synthetic construct
  misc_feature 1..128: note = Synthetic
  source 1..128: mol_type = other RNA
gagtagcgcgagcacagctagtttaagagctagaaatagcaagtttaaataaggctagtccgttatcagcgtgaaaacgcggcaccgagtcggtgcctccgtggccttataataagctgtgctcgcgc

SEQ ID NO: 294 - RNA, 132 nt, synthetic construct
  misc_feature 1..132: note = Synthetic
  source 1..132: mol_type = other RNA
gagtagcgcgagcacagctagtttaagagctagaaatagcaagtttaaataaggctagtccgttatcagcgtgaaaacgcggcaccgagtcggtgcctcgctccgtggccttataataagctgtgctcgcgc

SEQ ID NO: 295 - RNA, 127 nt, synthetic construct
  misc_feature 1..127: note = Synthetic
  source 1..127: mol_type = other RNA
gagtagcgcgagcacagctagtttaagagctagaaatagcaagtttaaataaggctagtccgttatcagcgtgaaaacgcggcaccgagtcggtgcgtggccttataataagctgtgctcgcgctac

SEQ ID NO: 296 - RNA, 131 nt, synthetic construct
  misc_feature 1..131: note = Synthetic
  source 1..131: mol_type = other RNA
gagtagcgcgagcacagctagtttaagagctagaaatagcaagtttaaataaggctagtccgttatcagcgtgaaaacgcggcaccgagtcggtgcctccgtggccttataataagctgtgctcgcgctac

SEQ ID NO: 297 - RNA, 135 nt, synthetic construct
  misc_feature 1..135: note = Synthetic
  source 1..135: mol_type = other RNA
gagtagcgcgagcacagctagtttaagagctagaaatagcaagtttaaataaggctagtccgttatcagcgtgaaaacgcggcaccgagtcggtgcctcgctccgtggccttataataagctgtgctcgcgctac

SEQ ID NO: 298 - RNA, 20 nt, synthetic construct
  misc_feature 1..20: note = Synthetic
  source 1..20: mol_type = other RNA
agggtaggagagactcacgc

SEQ ID NO: 299 - RNA, 19 nt, synthetic construct
  misc_feature 1..19: note = Synthetic
  source 1..19: mol_type = other RNA
gggtaggagagactcacgc

SEQ ID NO: 300 - RNA, 18 nt, synthetic construct
  misc_feature 1..18: note = Synthetic
  source 1..18: mol_type = other RNA
ggtaggagagactcacgc

SEQ ID NO: 301 - RNA, 17 nt, synthetic construct
  misc_feature 1..17: note = Synthetic
  source 1..17: mol_type = other RNA
gtaggagagactcacgc

SEQ ID NO: 302-306 - skipped (5 entries)

SEQ ID NO: 307 - RNA, 10 nt, synthetic construct
  misc_feature 1..10: note = Synthetic
  source 1..10: mol_type = other RNA
tgagtctctc

SEQ ID NO: 308 - RNA, 11 nt, synthetic construct
  misc_feature 1..11: note = Synthetic
  source 1..11: mol_type = other RNA
tgagtctctcc

SEQ ID NO: 309 - RNA, 12 nt, synthetic construct
  misc_feature 1..12: note = Synthetic
  source 1..12: mol_type = other RNA
tgagtctctcct

SEQ ID NO: 310 - RNA, 13 nt, synthetic construct
  misc_feature 1..13: note = Synthetic
  source 1..13: mol_type = other RNA
tgagtctctccta

SEQ ID NO: 311 - RNA, 14 nt, synthetic construct
  misc_feature 1..14: note = Synthetic
  source 1..14: mol_type = other RNA
tgagtctctcctac

SEQ ID NO: 312 - RNA, 15 nt, synthetic construct
  misc_feature 1..15: note = Synthetic
  source 1..15: mol_type = other RNA
tgagtctctcctacc

SEQ ID NO: 313 - RNA, 16 nt, synthetic construct
  misc_feature 1..16: note = Synthetic
  source 1..16: mol_type = other RNA
tgagtctctcctaccc

SEQ ID NO: 314 - RNA, 17 nt, synthetic construct
  misc_feature 1..17: note = Synthetic
  source 1..17: mol_type = other RNA
tgagtctctcctaccct

SEQ ID NO: 315 - RNA, 16 nt, synthetic construct
  misc_feature 1..16: note = Synthetic
  source 1..16: mol_type = other RNA
ctatccagtaataacg

SEQ ID NO: 316 - RNA, 20 nt, synthetic construct
  misc_feature 1..20: note = Synthetic
  source 1..20: mol_type = other RNA
gaggctatccagtaataacg

SEQ ID NO: 317 - RNA, 24 nt, synthetic construct
  misc_feature 1..24: note = Synthetic
  source 1..24: mol_type = other RNA
cctggaggctatccagtaataacg

SEQ ID NO: 318 - RNA, 121 nt, synthetic construct
  misc_feature 1..121: note = Synthetic
  source 1..121: mol_type = other RNA
agggtaggagagactcacgcgtttaagagctagaaatagcaagtttaaataaggctagtccgttatcagcgtgaaaacgcggcaccgagtcggtgcctatccagtaataacgtgagtctct

SEQ ID NO: 319 - RNA, 125 nt, synthetic construct
  misc_feature 1..125: note = Synthetic
  source 1..125: mol_type = other RNA
agggtaggagagactcacgcgtttaagagctagaaatagcaagtttaaataaggctagtccgttatcagcgtgaaaacgcggcaccgagtcggtgcgaggctatccagtaataacgtgagtctct

SEQ ID NO: 320 - RNA, 129 nt, synthetic construct
  misc_feature 1..129: note = Synthetic
  source 1..129: mol_type = other RNA
agggtaggagagactcacgcgtttaagagctagaaatagcaagtttaaataaggctagtccgttatcagcgtgaaaacgcggcaccgagtcggtgccctggaggctatccagtaataacgtgagtctct

SEQ ID NO: 321 - RNA, 124 nt, synthetic construct
  misc_feature 1..124: note = Synthetic
  source 1..124: mol_type = other RNA
agggtaggagagactcacgcgtttaagagctagaaatagcaagtttaaataaggctagtccgttatcagcgtgaaaacgcggcaccgagtcggtgcctatccagtaataacgtgagtctctcct

SEQ ID NO: 322 - RNA, 128 nt, synthetic construct
  misc_feature 1..128: note = Synthetic
  source 1..128: mol_type = other RNA
agggtaggagagactcacgcgtttaagagctagaaatagcaagtttaaataaggctagtccgttatcagcgtgaaaacgcggcaccgagtcggtgcgaggctatccagtaataacgtgagtctctcct

SEQ ID NO: 323 - RNA, 132 nt, synthetic construct
  misc_feature 1..132: note = Synthetic
  source 1..132: mol_type = other RNA
agggtaggagagactcacgcgtttaagagctagaaatagcaagtttaaataaggctagtccgttatcagcgtgaaaacgcggcaccgagtcggtgccctggaggctatccagtaataacgtgagtctctcct

SEQ ID NO: 324 - RNA, 127 nt, synthetic construct
  misc_feature 1..127: note = Synthetic
  source 1..127: mol_type = other RNA
agggtaggagagactcacgcgtttaagagctagaaatagcaagtttaaataaggctagtccgttatcagcgtgaaaacgcggcaccgagtcggtgcctatccagtaataacgtgagtctctcctacc

SEQ ID NO: 325 - RNA, 131 nt, synthetic construct
  misc_feature 1..131: note = Synthetic
  source 1..131: mol_type = other RNA
agggtaggagagactcacgcgtttaagagctagaaatagcaagtttaaataaggctagtccgttatcagcgtgaaaacgcggcaccgagtcggtgcgaggctatccagtaataacgtgagtctctcctacc

SEQ ID NO: 326 - RNA, 135 nt, synthetic construct
  misc_feature 1..135: note = Synthetic
  source 1..135: mol_type = other RNA
agggtaggagagactcacgcgtttaagagctagaaatagcaagtttaaataaggctagtccgttatcagcgtgaaaacgcggcaccgagtcggtgccctggaggctatccagtaataacgtgagtctctcctacc

SEQ ID NO: 327 - RNA, 20 nt, synthetic construct
  misc_feature 1..20: note = Synthetic
  source 1..20: mol_type = other RNA
cgcgagcacagctaaggcca

SEQ ID NO: 328 - RNA, 19 nt, synthetic construct
  misc_feature 1..19: note = Synthetic
  source 1..19: mol_type = other RNA
gcgagcacagctaaggcca

SEQ ID NO: 329 - RNA, 18 nt, synthetic construct
  misc_feature 1..18: note = Synthetic
  source 1..18: mol_type = other RNA
cgagcacagctaaggcca

SEQ ID NO: 330 - RNA, 17 nt, synthetic construct
  misc_feature 1..17: note = Synthetic
  source 1..17: mol_type = other RNA
gagcacagctaaggcca

SEQ ID NO: 331-335 - skipped (5 entries)

SEQ ID NO: 336 - RNA, 10 nt, synthetic construct
  misc_feature 1..10: note = Synthetic
  source 1..10: mol_type = other RNA
ccttagctgt

SEQ ID NO: 337 - RNA, 11 nt, synthetic construct
  misc_feature 1..11: note = Synthetic
  source 1..11: mol_type = other RNA
ccttagctgtg

SEQ ID NO: 338 - RNA, 12 nt, synthetic construct
  misc_feature 1..12: note = Synthetic
  source 1..12: mol_type = other RNA
ccttagctgtgc

SEQ ID NO: 339 - RNA, 13 nt, synthetic construct
  misc_feature 1..13: note = Synthetic
  source 1..13: mol_type = other RNA
ccttagctgtgct

SEQ ID NO: 340 - RNA, 14 nt, synthetic construct
  misc_feature 1..14: note = Synthetic
  source 1..14: mol_type = other RNA
ccttagctgtgctc

SEQ ID NO: 341 - RNA, 15 nt, synthetic construct
  misc_feature 1..15: note = Synthetic
  source 1..15: mol_type = other RNA
ccttagctgtgctcg

SEQ ID NO: 342 - RNA, 16 nt, synthetic construct
  misc_feature 1..16: note = Synthetic
  source 1..16: mol_type = other RNA
ccttagctgtgctcgc

SEQ ID NO: 343 - RNA, 17 nt, synthetic construct
  misc_feature 1..17: note = Synthetic
  source 1..17: mol_type = other RNA
ccttagctgtgctcgcg

SEQ ID NO: 344 - RNA, 16 nt, synthetic construct
  misc_feature 1..16: note = Synthetic
  source 1..16: mol_type = other RNA
cgctccgtgtaataag

SEQ ID NO: 345 - RNA, 20 nt, synthetic construct
  misc_feature 1..20: note = Synthetic
  source 1..20: mol_type = other RNA
gtctcgctccgtgtaataag

SEQ ID NO: 346 - RNA, 24 nt, synthetic construct
  misc_feature 1..24: note = Synthetic
  source 1..24: mol_type = other RNA
agatgtctcgctccgtgtaataag

SEQ ID NO: 347 - RNA, 121 nt, synthetic construct
  misc_feature 1..121: note = Synthetic
  source 1..121: mol_type = other RNA
cgcgagcacagctaaggccagtttaagagctagaaatagcaagtttaaataaggctagtccgttatcagcgtgaaaacgcggcaccgagtcggtgccgctccgtgtaataagccttagctg

SEQ ID NO: 348 - RNA, 125 nt, synthetic construct
  misc_feature 1..125: note = Synthetic
  source 1..125: mol_type = other RNA
cgcgagcacagctaaggccagtttaagagctagaaatagcaagtttaaataaggctagtccgttatcagcgtgaaaacgcggcaccgagtcggtgcgtctcgctccgtgtaataagccttagctg

SEQ ID NO: 349 - RNA, 129 nt, synthetic construct
  misc_feature 1..129: note = Synthetic
  source 1..129: mol_type = other RNA
cgcgagcacagctaaggccagtttaagagctagaaatagcaagtttaaataaggctagtccgttatcagcgtgaaaacgcggcaccgagtcggtgcagatgtctcgctccgtgtaataagccttagctg

SEQ ID NO: 350 - RNA, 124 nt, synthetic construct
  misc_feature 1..124: note = Synthetic
  source 1..124: mol_type = other RNA
cgcgagcacagctaaggccagtttaagagctagaaatagcaagtttaaataaggctagtccgttatcagcgtgaaaacgcggcaccgagtcggtgccgctccgtgtaataagccttagctgtgc

SEQ ID NO: 351 - RNA, 128 nt, synthetic construct
  misc_feature 1..128: note = Synthetic
  source 1..128: mol_type = other RNA
cgcgagcacagctaaggccagtttaagagctagaaatagcaagtttaaataaggctagtccgttatcagcgtgaaaacgcggcaccgagtcggtgcgtctcgctccgtgtaataagccttagctgtgc

SEQ ID NO: 352 - RNA, 132 nt, synthetic construct
  misc_feature 1..132: note = Synthetic
  source 1..132: mol_type = other RNA
cgcgagcacagctaaggccagtttaagagctagaaatagcaagtttaaataaggctagtccgttatcagcgtgaaaacgcggcaccgagtcggtgcagatgtctcgctccgtgtaataagccttagctgtgc

SEQ ID NO: 353 - RNA, 127 nt, synthetic construct
  misc_feature 1..127: note = Synthetic
  source 1..127: mol_type = other RNA
cgcgagcacagctaaggccagtttaagagctagaaatagcaagtttaaataaggctagtccgttatcagcgtgaaaacgcggcaccgagtcggtgccgctccgtgtaataagccttagctgtgctcg

SEQ ID NO: 354 - RNA, 131 nt, synthetic construct
  misc_feature 1..131: note = Synthetic
  source 1..131: mol_type = other RNA
cgcgagcacagctaaggccagtttaagagctagaaatagcaagtttaaataaggctagtccgttatcagcgtgaaaacgcggcaccgagtcggtgcgtctcgctccgtgtaataagccttagctgtgctcg

SEQ ID NO: 355 - RNA, 135 nt, synthetic construct
  misc_feature 1..135: note = Synthetic
  source 1..135: mol_type = other RNA
cgcgagcacagctaaggccagtttaagagctagaaatagcaagtttaaataaggctagtccgttatcagcgtgaaaacgcggcaccgagtcggtgcagatgtctcgctccgtgtaataagccttagctgtgctcg

SEQ ID NO: 356 - RNA, 20 nt, synthetic construct
  misc_feature 1..20: note = Synthetic
  source 1..20: mol_type = other RNA
gtcttttcccgatattcctc

SEQ ID NO: 357 - RNA, 19 nt, synthetic construct
  misc_feature 1..19: note = Synthetic
  source 1..19: mol_type = other RNA
tcttttcccgatattcctc

SEQ ID NO: 358 - RNA, 18 nt, synthetic construct
  misc_feature 1..18: note = Synthetic
  source 1..18: mol_type = other RNA
cttttcccgatattcctc

SEQ ID NO: 359 - RNA, 17 nt, synthetic construct
  misc_feature 1..17: note = Synthetic
  source 1..17: mol_type = other RNA
ttttcccgatattcctc

SEQ ID NO: 360-364 - skipped (5 entries)

SEQ ID NO: 365 - RNA, 10 nt, synthetic construct
  misc_feature 1..10: note = Synthetic
  source 1..10: mol_type = other RNA
gaatatcggg

SEQ ID NO: 366 - RNA, 11 nt, synthetic construct
  misc_feature 1..11: note = Synthetic
  source 1..11: mol_type = other RNA
gaatatcggga

SEQ ID NO: 367 - RNA, 12 nt, synthetic construct
  misc_feature 1..12: note = Synthetic
  source 1..12: mol_type = other RNA
gaatatcgggaa

SEQ ID NO: 368 - RNA, 13 nt, synthetic construct
  misc_feature 1..13: note = Synthetic
  source 1..13: mol_type = other RNA
gaatatcgggaaa

SEQ ID NO: 369 - RNA, 14 nt, synthetic construct
  misc_feature 1..14: note = Synthetic
  source 1..14: mol_type = other RNA
gaatatcgggaaaa

SEQ ID NO: 370 - RNA, 15 nt, synthetic construct
  misc_feature 1..15: note = Synthetic
  source 1..15: mol_type = other RNA
gaatatcgggaaaag

SEQ ID NO: 371 - RNA, 16 nt, synthetic construct
  misc_feature 1..16: note = Synthetic
  source 1..16: mol_type = other RNA
gaatatcgggaaaaga

SEQ ID NO: 372 - RNA, 17 nt, synthetic construct
  misc_feature 1..17: note = Synthetic
  source 1..17: mol_type = other RNA
gaatatcgggaaaagac

SEQ ID NO: 373 - RNA, 16 nt, synthetic construct
  misc_feature 1..16: note = Synthetic
  source 1..16: mol_type = other RNA
agtttattaacctgag

SEQ ID NO: 374 - RNA, 20 nt, synthetic construct
  misc_feature 1..20: note = Synthetic
  source 1..20: mol_type = other RNA
ttggagtttattaacctgag

SEQ ID NO: 375 - RNA, 24 nt, synthetic construct
  misc_feature 1..24: note = Synthetic
  source 1..24: mol_type = other RNA
atctttggagtttattaacctgag

SEQ ID NO: 376 - RNA, 121 nt, synthetic construct
  misc_feature 1..121: note = Synthetic
  source 1..121: mol_type = other RNA
gtcttttcccgatattcctcgtttaagagctagaaatagcaagtttaaataaggctagtccgttatcagcgtgaaaacgcggcaccgagtcggtgcagtttattaacctgaggaatatcgg

SEQ ID NO: 377 - RNA, 125 nt, synthetic construct
  misc_feature 1..125: note = Synthetic
  source 1..125: mol_type = other RNA
gtcttttcccgatattcctcgtttaagagctagaaatagcaagtttaaataaggctagtccgttatcagcgtgaaaacgcggcaccgagtcggtgcttggagtttattaacctgaggaatatcgg

SEQ ID NO: 378 - RNA, 129 nt, synthetic construct
  misc_feature 1..129: note = Synthetic
  source 1..129: mol_type = other RNA
gtcttttcccgatattcctcgtttaagagctagaaatagcaagtttaaataaggctagtccgttatcagcgtgaaaacgcggcaccgagtcggtgcatctttggagtttattaacctgaggaatatcgg

SEQ ID NO: 379 - RNA, 124 nt, synthetic construct
  misc_feature 1..124: note = Synthetic
  source 1..124: mol_type = other RNA
gtcttttcccgatattcctcgtttaagagctagaaatagcaagtttaaataaggctagtccgttatcagcgtgaaaacgcggcaccgagtcggtgcagtttattaacctgaggaatatcgggaa

SEQ ID NO: 380 - RNA, 128 nt, synthetic construct
  misc_feature 1..128: note = Synthetic
  source 1..128: mol_type = other RNA
gtcttttcccgatattcctcgtttaagagctagaaatagcaagtttaaataaggctagtccgttatcagcgtgaaaacgcggcaccgagtcggtgcttggagtttattaacctgaggaatatcgggaa

SEQ ID NO: 381 - RNA, 132 nt, synthetic construct
  misc_feature 1..132: note = Synthetic
  source 1..132: mol_type = other RNA
gtcttttcccgatattcctcgtttaagagctagaaatagcaagtttaaataaggctagtccgttatcagcgtgaaaacgcggcaccgagtcggtgcatctttggagtttattaacctgaggaatatcgggaa

SEQ ID NO: 382 - RNA, 127 nt, synthetic construct
  misc_feature 1..127: note = Synthetic
  source 1..127: mol_type = other RNA
gtcttttcccgatattcctcgtttaagagctagaaatagcaagtttaaataaggctagtccgttatcagcgtgaaaacgcggcaccgagtcggtgcagtttattaacctgaggaatatcgggaaaag

SEQ ID NO: 383 - RNA, 131 nt, synthetic construct
  misc_feature 1..131: note = Synthetic
  source 1..131: mol_type = other RNA
gtcttttcccgatattcctcgtttaagagctagaaatagcaagtttaaataaggctagtccgttatcagcgtgaaaacgcggcaccgagtcggtgcttggagtttattaacctgaggaatatcgggaaaag

SEQ ID NO: 384 - RNA, 135 nt, synthetic construct
  misc_feature 1..135: note = Synthetic
  source 1..135: mol_type = other RNA
gtcttttcccgatattcctcgtttaagagctagaaatagcaagtttaaataaggctagtccgttatcagcgtgaaaacgcggcaccgagtcggtgcatctttggagtttattaacctgaggaatatcgggaaaag

SEQ ID NO: 385 - RNA, 20 nt, synthetic construct
  misc_feature 1..20: note = Synthetic
  source 1..20: mol_type = other RNA
ctcaggtactccaaagattc

SEQ ID NO: 386 - RNA, 19 nt, synthetic construct
  misc_feature 1..19: note = Synthetic
  source 1..19: mol_type = other RNA
tcaggtactccaaagattc

SEQ ID NO: 387 - RNA, 18 nt, synthetic construct
  misc_feature 1..18: note = Synthetic
  source 1..18: mol_type = other RNA
caggtactccaaagattc

SEQ ID NO: 388 - RNA, 17 nt, synthetic construct
  misc_feature 1..17: note = Synthetic
  source 1..17: mol_type = other RNA
aggtactccaaagattc

SEQ ID NO: 389-393 - skipped (5 entries)

SEQ ID NO: 394 - RNA, 10 nt, synthetic construct
  misc_feature 1..10: note = Synthetic
  source 1..10: mol_type = other RNA
tctttggagt

SEQ ID NO: 395 - RNA, 11 nt, synthetic construct
  misc_feature 1..11: note = Synthetic
  source 1..11: mol_type = other RNA
tctttggagta

SEQ ID NO: 396 - RNA, 12 nt, synthetic construct
  misc_feature 1..12: note = Synthetic
  source 1..12: mol_type = other RNA
tctttggagtac

SEQ ID NO: 397 - RNA, 13 nt, synthetic construct
  misc_feature 1..13: note = Synthetic
  source 1..13: mol_type = other RNA
tctttggagtacc

SEQ ID NO: 398 - RNA, 14 nt, synthetic construct
  misc_feature 1..14: note = Synthetic
  source 1..14: mol_type = other RNA
tctttggagtacct

SEQ ID NO: 399 - RNA, 15 nt, synthetic construct
  misc_feature 1..15: note = Synthetic
  source 1..15: mol_type = other RNA
tctttggagtacctg

SEQ ID NO: 400 - RNA, 16 nt, synthetic construct
  misc_feature 1..16: note = Synthetic
  source 1..16: mol_type = other RNA
tctttggagtacctga

SEQ ID NO: 401 - RNA, 17 nt, synthetic construct
  misc_feature 1..17: note = Synthetic
  source 1..17: mol_type = other RNA
tctttggagtacctgag

SEQ ID NO: 402 - RNA, 16 nt, synthetic construct
  misc_feature 1..16: note = Synthetic
  source 1..16: mol_type = other RNA
taaacctgttattaaa

SEQ ID NO: 403 - RNA, 20 nt, synthetic construct
  misc_feature 1..20: note = Synthetic
  source 1..20: mol_type = other RNA
tgagtaaacctgttattaaa

SEQ ID NO: 404 - RNA, 24 nt, synthetic construct
  misc_feature 1..24: note = Synthetic
  source 1..24: mol_type = other RNA
gacgtgagtaaacctgttattaaa

SEQ ID NO: 405 - RNA, 121 nt, synthetic construct
  misc_feature 1..121: note = Synthetic
  source 1..121: mol_type = other RNA
ctcaggtactccaaagattcgtttaagagctagaaatagcaagtttaaataaggctagtccgttatcagcgtgaaaacgcggcaccgagtcggtgctaaacctgttattaaatctttggag

SEQ ID NO: 406 - RNA, 125 nt, synthetic construct
  misc_feature 1..125: note = Synthetic
  source 1..125: mol_type = other RNA
ctcaggtactccaaagattcgtttaagagctagaaatagcaagtttaaataaggctagtccgttatcagcgtgaaaacgcggcaccgagtcggtgctgagtaaacctgttattaaatctttggag

SEQ ID NO: 407 - RNA, 129 nt, synthetic construct
  misc_feature 1..129: note = Synthetic
  source 1..129: mol_type = other RNA
ctcaggtactccaaagattcgtttaagagctagaaatagcaagtttaaataaggctagtccgttatcagcgtgaaaacgcggcaccgagtcggtgcgacgtgagtaaacctgttattaaatctttggag

SEQ ID NO: 408 - RNA, 124 nt, synthetic construct
  misc_feature 1..124: note = Synthetic
  source 1..124: mol_type = other RNA
ctcaggtactccaaagattcgtttaagagctagaaatagcaagtttaaataaggctagtccgttatcagcgtgaaaacgcggcaccgagtcggtgctaaacctgttattaaatctttggagtac

SEQ ID NO: 409 - RNA, 128 nt, synthetic construct
  misc_feature 1..128: note = Synthetic
  source 1..128: mol_type = other RNA
ctcaggtactccaaagattcgtttaagagctagaaatagcaagtttaaataaggctagtccgttatcagcgtgaaaacgcggcaccgagtcggtgctgagtaaacctgttattaaatctttggagtac

SEQ ID NO: 410 - RNA, 132 nt, synthetic construct
  misc_feature 1..132: note = Synthetic
  source 1..132: mol_type = other RNA
ctcaggtactccaaagattcgtttaagagctagaaatagcaagtttaaataaggctagtccgttatcagcgtgaaaacgcggcaccgagtcggtgcgacgtgagtaaacctgttattaaatctttggagtac

SEQ ID NO: 411 - RNA, 127 nt, synthetic construct
  misc_feature 1..127: note = Synthetic
  source 1..127: mol_type = other RNA
ctcaggtactccaaagattcgtttaagagctagaaatagcaagtttaaataaggctagtccgttatcagcgtgaaaacgcggcaccgagtcggtgctaaacctgttattaaatctttggagtacctg

SEQ ID NO: 412 - RNA, 131 nt, synthetic construct
  misc_feature 1..131: note = Synthetic
  source 1..131: mol_type = other RNA
ctcaggtactccaaagattcgtttaagagctagaaatagcaagtttaaataaggctagtccgttatcagcgtgaaaacgcggcaccgagtcggtgctgagtaaacctgttattaaatctttggagtacctg

SEQ ID NO: 413 - RNA, 135 nt, synthetic construct
  misc_feature 1..135: note = Synthetic
  source 1..135: mol_type = other RNA
ctcaggtactccaaagattcgtttaagagctagaaatagcaagtttaaataaggctagtccgttatcagcgtgaaaacgcggcaccgagtcggtgcgacgtgagtaaacctgttattaaatctttggagtacctg

SEQ ID NO: 414 - RNA, 20 nt, synthetic construct
  misc_feature 1..20: note = Synthetic
  source 1..20: mol_type = other RNA
tcacgtcatccagcagagaa

SEQ ID NO: 415 - RNA, 19 nt, synthetic construct
  misc_feature 1..19: note = Synthetic
  source 1..19: mol_type = other RNA
cacgtcatccagcagagaa

SEQ ID NO: 416 - RNA, 18 nt, synthetic construct
  misc_feature 1..18: note = Synthetic
  source 1..18: mol_type = other RNA
acgtcatccagcagagaa

SEQ ID NO: 417 - RNA, 17 nt, synthetic construct
  misc_feature 1..17: note = Synthetic
  source 1..17: mol_type = other RNA
cgtcatccagcagagaa

SEQ ID NO: 418-422 - skipped (5 entries)

SEQ ID NO: 423 - RNA, 10 nt, synthetic construct
  misc_feature 1..10: note = Synthetic
  source 1..10: mol_type = other RNA
tctgctggat

SEQ ID NO: 424 - RNA, 11 nt, synthetic construct
  misc_feature 1..11: note = Synthetic
  source 1..11: mol_type = other RNA
tctgctggatg

SEQ ID NO: 425 - RNA, 12 nt, synthetic construct
  misc_feature 1..12: note = Synthetic
  source 1..12: mol_type = other RNA
tctgctggatga

SEQ ID NO: 426 - RNA, 13 nt, synthetic construct
  misc_feature 1..13: note = Synthetic
  source 1..13: mol_type = other RNA
tctgctggatgac

SEQ ID NO: 427 - RNA, 14 nt, synthetic construct
  misc_feature 1..14: note = Synthetic
  source 1..14: mol_type = other RNA
tctgctggatgacg

SEQ ID NO: 428 - RNA, 15 nt, synthetic construct
  misc_feature 1..15: note = Synthetic
  source 1..15: mol_type = other RNA
tctgctggatgacgt

SEQ ID NO: 429 - RNA, 16 nt, synthetic construct
  misc_feature 1..16: note = Synthetic
  source 1..16: mol_type = other RNA
tctgctggatgacgtg

SEQ ID NO: 430 - RNA, 17 nt, synthetic construct
  misc_feature 1..17: note = Synthetic
  source 1..17: mol_type = other RNA
tctgctggatgacgtga

SEQ ID NO: 431 - RNA, 16 nt, synthetic construct
  misc_feature 1..16: note = Synthetic
  source 1..16: mol_type = other RNA
ctttccattttattac

SEQ ID NO: 432 - RNA, 20 nt, synthetic construct
  misc_feature 1..20: note = Synthetic
  source 1..20: mol_type = other RNA
ttgactttccattttattac

SEQ ID NO: 433 - RNA, 24 nt, synthetic construct
  misc_feature 1..24: note = Synthetic
  source 1..24: mol_type = other RNA
aaatttgactttccattttattac

SEQ ID NO: 434 - RNA, 121 nt, synthetic construct
  misc_feature 1..121: note = Synthetic
  source 1..121: mol_type = other RNA
tcacgtcatccagcagagaagtttaagagctagaaatagcaagtttaaataaggctagtccgttatcagcgtgaaaacgcggcaccgagtcggtgcctttccattttattactctgctgga

SEQ ID NO: 435 - RNA, 125 nt, synthetic construct
  misc_feature 1..125: note = Synthetic
  source 1..125: mol_type = other RNA
tcacgtcatccagcagagaagtttaagagctagaaatagcaagtttaaataaggctagtccgttatcagcgtgaaaacgcggcaccgagtcggtgcttgactttccattttattactctgctgga

SEQ ID NO: 436 - RNA, 129 nt, synthetic construct
  misc_feature 1..129: note = Synthetic
  source 1..129: mol_type = other RNA
tcacgtcatccagcagagaagtttaagagctagaaatagcaagtttaaataaggctagtccgttatcagcgtgaaaacgcggcaccgagtcggtgcaaatttgactttccattttattactctgctgga

SEQ ID NO: 437 - RNA, 124 nt, synthetic construct
  misc_feature 1..124: note = Synthetic
  source 1..124: mol_type = other RNA
tcacgtcatccagcagagaagtttaagagctagaaatagcaagtttaaataaggctagtccgttatcagcgtgaaaacgcggcaccgagtcggtgcctttccattttattactctgctggatga

SEQ ID NO: 438 - RNA, 128 nt, synthetic construct
  misc_feature 1..128: note = Synthetic
  source 1..128: mol_type = other RNA
tcacgtcatccagcagagaagtttaagagctagaaatagcaagtttaaataaggctagtccgttatcagcgtgaaaacgcggcaccgagtcggtgcttgactttccattttattactctgctggatga

SEQ ID NO: 439 - RNA, 132 nt, synthetic construct
  misc_feature 1..132: note = Synthetic
  source 1..132: mol_type = other RNA
tcacgtcatccagcagagaagtttaagagctagaaatagcaagtttaaataaggctagtccgttatcagcgtgaaaacgcggcaccgagtcggtgcaaatttgactttccattttattactctgctggatga

SEQ ID NO: 440 - RNA, 127 nt, synthetic construct
  misc_feature 1..127: note = Synthetic
  source 1..127: mol_type = other RNA
tcacgtcatccagcagagaagtttaagagctagaaatagcaagtttaaataaggctagtccgttatcagcgtgaaaacgcggcaccgagtcggtgcctttccattttattactctgctggatgacgt

SEQ ID NO: 441 - RNA, 131 nt, synthetic construct
  misc_feature 1..131: note = Synthetic
  source 1..131: mol_type = other RNA
tcacgtcatccagcagagaagtttaagagctagaaatagcaagtttaaataaggctagtccgttatcagcgtgaaaacgcggcaccgagtcggtgcttgactttccattttattactctgctggatgacgt

SEQ ID NO: 442 - RNA, 135 nt, synthetic construct
  misc_feature 1..135: note = Synthetic
  source 1..135: mol_type = other RNA
tcacgtcatccagcagagaagtttaagagctagaaatagcaagtttaaataaggctagtccgttatcagcgtgaaaacgcggcaccgagtcggtgcaaatttgactttccattttattactctgctggatgacgt

SEQ ID NO: 443 - RNA, 20 nt, synthetic construct
  misc_feature 1..20: note = Synthetic
  source 1..20: mol_type = other RNA
ttcctgaattgctatgtgtc

SEQ ID NO: 444 - RNA, 19 nt, synthetic construct
  misc_feature 1..19: note = Synthetic
  source 1..19: mol_type = other RNA
tcctgaattgctatgtgtc

SEQ ID NO: 445 - RNA, 18 nt, synthetic construct
  misc_feature 1..18: note = Synthetic
  source 1..18: mol_type = other RNA
cctgaattgctatgtgtc

SEQ ID NO: 446 - RNA, 17 nt, synthetic construct
  misc_feature 1..17: note = Synthetic
  source 1..17: mol_type = other RNA
ctgaattgctatgtgtc

SEQ ID NO: 447-451 - skipped (5 entries)

SEQ ID NO: 452 - RNA, 10 nt, synthetic construct
  misc_feature 1..10: note = Synthetic
  source 1..10: mol_type = other RNA
acatagcaat

SEQ ID NO: 453 - RNA, 11 nt, synthetic construct
  misc_feature 1..11: note = Synthetic
  source 1..11: mol_type = other RNA
acatagcaatt

SEQ ID NO: 454 - RNA, 12 nt, synthetic construct
  misc_feature 1..12: note = Synthetic
  source 1..12: mol_type = other RNA
acatagcaattc

SEQ ID NO: 455 - RNA, 13 nt, synthetic construct
  misc_feature 1..13: note = Synthetic
  source 1..13: mol_type = other RNA
acatagcaattca

SEQ ID NO: 456 - RNA, 14 nt, synthetic construct
  misc_feature 1..14: note = Synthetic
  source 1..14: mol_type = other RNA
acatagcaattcag

SEQ ID NO: 457 - RNA, 15 nt, synthetic construct
  misc_feature 1..15: note = Synthetic
  source 1..15: mol_type = other RNA
acatagcaattcagg

SEQ ID NO: 458 - RNA, 16 nt, synthetic construct
  misc_feature 1..16: note = Synthetic
  source 1..16: mol_type = other RNA
acatagcaattcagga

SEQ ID NO: 459 - RNA, 17 nt, synthetic construct
  misc_feature 1..17: note = Synthetic
  source 1..17: mol_type = other RNA
acatagcaattcaggaa

SEQ ID NO: 460 - RNA, 16 nt, synthetic construct
  misc_feature 1..16: note = Synthetic
  source 1..16: mol_type = other RNA
aaacccagattattac

SEQ ID NO: 461 - RNA, 20 nt, synthetic construct
  misc_feature 1..20: note = Synthetic
  source 1..20: mol_type = other RNA
gatgaaacccagattattac

SEQ ID NO: 462 - RNA, 24 nt, synthetic construct
  misc_feature 1..24: note = Synthetic
  source 1..24: mol_type = other RNA
gatggatgaaacccagattattac

SEQ ID NO: 463 - RNA, 121 nt, synthetic construct
  misc_feature 1..121: note = Synthetic
  source 1..121: mol_type = other RNA
ttcctgaattgctatgtgtcgtttaagagctagaaatagcaagtttaaataaggctagtccgttatcagcgtgaaaacgcggcaccgagtcggtgcaaacccagattattacacatagcaa

SEQ ID NO: 464 - RNA, 125 nt, synthetic construct
  misc_feature 1..125: note = Synthetic
  source 1..125: mol_type = other RNA
ttcctgaattgctatgtgtcgtttaagagctagaaatagcaagtttaaataaggctagtccgttatcagcgtgaaaacgcggcaccgagtcggtgcgatgaaacccagattattacacatagcaa

SEQ ID NO: 465 - RNA, 129 nt, synthetic construct
  misc_feature 1..129: note = Synthetic
  source 1..129: mol_type = other RNA
ttcctgaattgctatgtgtcgtttaagagctagaaatagcaagtttaaataaggctagtccgttatcagcgtgaaaacgcggcaccgagtcggtgcgatggatgaaacccagattattacacatagcaa

SEQ ID NO: 466 - RNA, 124 nt, synthetic construct
  misc_feature 1..124: note = Synthetic
  source 1..124: mol_type = other RNA
ttcctgaattgctatgtgtcgtttaagagctagaaatagcaagtttaaataaggctagtccgttatcagcgtgaaaacgcggcaccgagtcggtgcaaacccagattattacacatagcaattc

SEQ ID NO: 467 - RNA, 128 nt, synthetic construct
  misc_feature 1..128: note = Synthetic
  source 1..128: mol_type = other RNA
ttcctgaattgctatgtgtcgtttaagagctagaaatagcaagtttaaataaggctagtccgttatcagcgtgaaaacgcggcaccgagtcggtgcgatgaaacccagattattacacatagcaattc

SEQ ID NO: 468 - RNA, 132 nt, synthetic construct
  misc_feature 1..132: note = Synthetic
  source 1..132: mol_type = other RNA
ttcctgaattgctatgtgtcgtttaagagctagaaatagcaagtttaaataaggctagtccgttatcagcgtgaaaacgcggcaccgagtcggtgcgatggatgaaacccagattattacacatagcaattc

SEQ ID NO: 469 - RNA, 127 nt, synthetic construct
  misc_feature 1..127: note = Synthetic
  source 1..127: mol_type = other RNA
ttcctgaattgctatgtgtcgtttaagagctagaaatagcaagtttaaataaggctagtccgttatcagcgtgaaaacgcggcaccgagtcggtgcaaacccagattattacacatagcaattcagg

SEQ ID NO: 470 - RNA, 131 nt, synthetic construct
  misc_feature 1..131: note = Synthetic
  source 1..131: mol_type = other RNA
ttcctgaattgctatgtgtcgtttaagagctagaaatagcaagtttaaataaggctagtccgttatcagcgtgaaaacgcggcaccgagtcggtgcgatgaaacccagattattacacatagcaattcagg

SEQ ID NO: 471 - RNA, 135 nt, synthetic construct
  misc_feature 1..135: note = Synthetic
  source 1..135: mol_type = other RNA
ttcctgaattgctatgtgtcgtttaagagctagaaatagcaagtttaaataaggctagtccgttatcagcgtgaaaacgcggcaccgagtcggtgcgatggatgaaacccagattattacacatagcaattcagg

SEQ ID NO: 472 - RNA, 20 nt, synthetic construct
  misc_feature 1..20: note = Synthetic
  source 1..20: mol_type = other RNA
tcctgaattgctatgtgtct

SEQ ID NO: 473 - RNA, 19 nt, synthetic construct
  misc_feature 1..19: note = Synthetic
  source 1..19: mol_type = other RNA
cctgaattgctatgtgtct

SEQ ID NO: 474 - RNA, 18 nt, synthetic construct
  misc_feature 1..18: note = Synthetic
  source 1..18: mol_type = other RNA
ctgaattgctatgtgtct

SEQ ID NO: 475 - RNA, 17 nt, synthetic construct
  misc_feature 1..17: note = Synthetic
  source 1..17: mol_type = other RNA
tgaattgctatgtgtct

SEQ ID NO: 476-480 - skipped (5 entries)

SEQ ID NO: 481 - RNA, 10 nt, synthetic construct
  misc_feature 1..10: note = Synthetic
  source 1..10: mol_type = other RNA
cacatagcaa

SEQ ID NO: 482 - RNA, 11 nt, synthetic construct
  misc_feature 1..11: note = Synthetic
  source 1..11: mol_type = other RNA
cacatagcaat

SEQ ID NO: 483 - RNA, 12 nt, synthetic construct
  misc_feature 1..12: note = Synthetic
  source 1..12: mol_type = other RNA
cacatagcaatt

SEQ ID NO: 484 - RNA, 13 nt, synthetic construct
  misc_feature 1..13: note = Synthetic
  source 1..13: mol_type = other RNA
cacatagcaattc

SEQ ID NO: 485 - RNA, 14 nt, synthetic construct
  misc_feature 1..14: note = Synthetic
  source 1..14: mol_type = other RNA
cacatagcaattca

SEQ ID NO: 486 - RNA, 15 nt, synthetic construct
  misc_feature 1..15: note = Synthetic
  source 1..15: mol_type = other RNA
cacatagcaattcag

SEQ ID NO: 487 - RNA, 16 nt, synthetic construct
  misc_feature 1..16: note = Synthetic
  source 1..16: mol_type = other RNA
cacatagcaattcagg

SEQ ID NO: 488 - RNA, 17 nt, synthetic construct
  misc_feature 1..17: note = Synthetic
  source 1..17: mol_type = other RNA
cacatagcaattcagga

SEQ ID NO: 489 - RNA, 16 nt, synthetic construct
  misc_feature 1..16: note = Synthetic
  source 1..16: mol_type = other RNA
gaaacccttattaaga

SEQ ID NO: 490 - RNA, 20 nt, synthetic construct
  misc_feature 1..20: note = Synthetic
  source 1..20: mol_type = other RNA
ggatgaaacccttattaaga

SEQ ID NO: 491 - RNA, 24 nt, synthetic construct
  misc_feature 1..24: note = Synthetic
  source 1..24: mol_type = other RNA
ggatggatgaaacccttattaaga

SEQ ID NO: 492 - RNA, 121 nt, synthetic construct
  misc_feature 1..121: note = Synthetic
  source 1..121: mol_type = other RNA
tcctgaattgctatgtgtctgtttaagagctagaaatagcaagtttaaataaggctagtccgttatcagcgtgaaaacgcggcaccgagtcggtgcgaaacccttattaagacacatagca

SEQ ID NO: 493 - RNA, 125 nt, synthetic construct
  misc_feature 1..125: note = Synthetic
  source 1..125: mol_type = other RNA
tcctgaattgctatgtgtctgtttaagagctagaaatagcaagtttaaataaggctagtccgttatcagcgtgaaaacgcggcaccgagtcggtgcggatgaaacccttattaagacacatagca

SEQ ID NO: 494 - RNA, 129 nt, synthetic construct
  misc_feature 1..129: note = Synthetic
  source 1..129: mol_type = other RNA
tcctgaattgctatgtgtctgtttaagagctagaaatagcaagtttaaataaggctagtccgttatcagcgtgaaaacgcggcaccgagtcggtgcggatggatgaaacccttattaagacacatagca

SEQ ID NO: 495 - RNA, 124 nt, synthetic construct
  misc_feature 1..124: note = Synthetic
  source 1..124: mol_type = other RNA
tcctgaattgctatgtgtctgtttaagagctagaaatagcaagtttaaataaggctagtccgttatcagcgtgaaaacgcggcaccgagtcggtgcgaaacccttattaagacacatagcaatt

SEQ ID NO: 496 - RNA, 128 nt, synthetic construct
  misc_feature 1..128: note = Synthetic
  source 1..128: mol_type = other RNA
tcctgaattgctatgtgtctgtttaagagctagaaatagcaagtttaaataaggctagtccgttatcagcgtgaaaacgcggcaccgagtcggtgcggatgaaacccttattaagacacatagcaatt

SEQ ID NO: 497 - RNA, 132 nt, synthetic construct
  misc_feature 1..132: note = Synthetic
  source 1..132: mol_type = other RNA
tcctgaattgctatgtgtctgtttaagagctagaaatagcaagtttaaataaggctagtccgttatcagcgtgaaaacgcggcaccgagtcggtgcggatggatgaaacccttattaagacacatagcaatt

SEQ ID NO: 498 - RNA, 127 nt, synthetic construct
  misc_feature 1..127: note = Synthetic
  source 1..127: mol_type = other RNA
tcctgaattgctatgtgtctgtttaagagctagaaatagcaagtttaaataaggctagtccgttatcagcgtgaaaacgcggcaccgagtcggtgcgaaacccttattaagacacatagcaattcag

SEQ ID NO: 499 - RNA, 131 nt, synthetic construct
  misc_feature 1..131: note = Synthetic
  source 1..131: mol_type = other RNA
tcctgaattgctatgtgtctgtttaagagctagaaatagcaagtttaaataaggctagtccgttatcagcgtgaaaacgcggcaccgagtcggtgcggatgaaacccttattaagacacatagcaattcag

SEQ ID NO: 500 - RNA, 135 nt, synthetic construct
  misc_feature 1..135: note = Synthetic
  source 1..135: mol_type = other RNA
tcctgaattgctatgtgtctgtttaagagctagaaatagcaagtttaaataaggctagtccgttatcagcgtgaaaacgcggcaccgagtcggtgcggatggatgaaacccttattaagacacatagcaattcag

SEQ ID NO: 501 - RNA, 20 nt, synthetic construct
  misc_feature 1..20: note = Synthetic
  source 1..20: mol_type = other RNA
acccagacacatagcaattc

SEQ ID NO: 502 - RNA, 19 nt, synthetic construct
  misc_feature 1..19: note = Synthetic
  source 1..19: mol_type = other RNA
cccagacacatagcaattc

SEQ ID NO: 503 - RNA, 18 nt, synthetic construct
  misc_feature 1..18: note = Synthetic
  source 1..18: mol_type = other RNA
ccagacacatagcaattc

SEQ ID NO: 504 - RNA, 17 nt, synthetic construct
  misc_feature 1..17: note = Synthetic
  source 1..17: mol_type = other RNA
cagacacatagcaattc

SEQ ID NO: 505-509 - skipped (5 entries)

SEQ ID NO: 510 - RNA, 10 nt, synthetic construct
  misc_feature 1..10: note = Synthetic
  source 1..10: mol_type = other RNA
ttgctatgtg

SEQ ID NO: 511 - RNA, 11 nt, synthetic construct
  misc_feature 1..11: note = Synthetic
  source 1..11: mol_type = other RNA
ttgctatgtgt

SEQ ID NO: 512 - RNA, 12 nt, synthetic construct
  misc_feature 1..12: note = Synthetic
  source 1..12: mol_type = other RNA
ttgctatgtgtc

SEQ ID NO: 513 - RNA, 13 nt, synthetic construct
  misc_feature 1..13: note = Synthetic
  source 1..13: mol_type = other RNA
ttgctatgtgtct

SEQ ID NO: 514 - RNA, 14 nt, synthetic construct
  misc_feature 1..14: note = Synthetic
  source 1..14: mol_type = other RNA
ttgctatgtgtctg

SEQ ID NO: 515 - RNA, 15 nt, synthetic construct
  misc_feature 1..15: note = Synthetic
  source 1..15: mol_type = other RNA
ttgctatgtgtctgg

SEQ ID NO: 516 - RNA, 16 nt, synthetic construct
  misc_feature 1..16: note = Synthetic
  source 1..16: mol_type = other RNA
ttgctatgtgtctggg

SEQ ID NO: 517 - RNA, 17 nt, synthetic construct
  misc_feature 1..17: note = Synthetic
  source 1..17: mol_type = other RNA
ttgctatgtgtctgggt

SEQ ID NO: 518 - RNA, 16 nt, synthetic construct
  misc_feature 1..16: note = Synthetic
  source 1..16: mol_type = other RNA
atttcctgtaataaaa

SEQ ID NO: 519 - RNA, 20 nt, synthetic construct
  misc_feature 1..20: note = Synthetic
  source 1..20: mol_type = other RNA
tcaaatttcctgtaataaaa

SEQ ID NO: 520 - RNA, 24 nt, synthetic construct
  misc_feature 1..24: note = Synthetic
  source 1..24: mol_type = other RNA
aaagtcaaatttcctgtaataaaa

SEQ ID NO: 521 - RNA, 121 nt, synthetic construct
  misc_feature 1..121: note = Synthetic
  source 1..121: mol_type = other RNA
acccagacacatagcaattcgtttaagagctagaaatagcaagtttaaataaggctagtccgttatcagcgtgaaaacgcggcaccgagtcggtgcatttcctgtaataaaattgctatgt

SEQ ID NO: 522 - RNA, 125 nt, synthetic construct
  misc_feature 1..125: note = Synthetic
  source 1..125: mol_type = other RNA
acccagacacatagcaattcgtttaagagctagaaatagcaagtttaaataaggctagtccgttatcagcgtgaaaacgcggcaccgagtcggtgctcaaatttcctgtaataaaattgctatgt

SEQ ID NO: 523 - RNA, 129 nt, synthetic construct
  misc_feature 1..129: note = Synthetic
  source 1..129: mol_type = other RNA
acccagacacatagcaattcgtttaagagctagaaatagcaagtttaaataaggctagtccgttatcagcgtgaaaacgcggcaccgagtcggtgcaaagtcaaatttcctgtaataaaattgctatgt

SEQ ID NO: 524 - RNA, 124 nt, synthetic construct
  misc_feature 1..124: note = Synthetic
  source 1..124: mol_type = other RNA
acccagacacatagcaattcgtttaagagctagaaatagcaagtttaaataaggctagtccgttatcagcgtgaaaacgcggcaccgagtcggtgcatttcctgtaataaaattgctatgtgtc

SEQ ID NO: 525 - RNA, 128 nt, synthetic construct
  misc_feature 1..128: note = Synthetic
  source 1..128: mol_type = other RNA
acccagacacatagcaattcgtttaagagctagaaatagcaagtttaaataaggctagtccgttatcagcgtgaaaacgcggcaccgagtcggtgctcaaatttcctgtaataaaattgctatgtgtc

SEQ ID NO: 526 - RNA, 132 nt, synthetic construct
  misc_feature 1..132: note = Synthetic
  source 1..132: mol_type = other RNA
acccagacacatagcaattcgtttaagagctagaaatagcaagtttaaataaggctagtccgttatcagcgtgaaaacgcggcaccgagtcggtgcaaagtcaaatttcctgtaataaaattgctatgtgtc

SEQ ID NO: 527 - RNA, 127 nt, synthetic construct
  misc_feature 1..127: note = Synthetic
  source 1..127: mol_type = other RNA
acccagacacatagcaattcgtttaagagctagaaatagcaagtttaaataaggctagtccgttatcagcgtgaaaacgcggcaccgagtcggtgcatttcctgtaataaaattgctatgtgtctgg

SEQ ID NO: 528 - RNA, 131 nt, synthetic construct
  misc_feature 1..131: note = Synthetic
  source 1..131: mol_type = other RNA
acccagacacatagcaattcgtttaagagctagaaatagcaagtttaaataaggctagtccgttatcagcgtgaaaacgcggcaccgagtcggtgctcaaatttcctgtaataaaattgctatgtgtctgg

SEQ ID NO: 529 - RNA, 135 nt, synthetic construct
  misc_feature 1..135: note = Synthetic
  source 1..135: mol_type = other RNA
acccagacacatagcaattcgtttaagagctagaaatagcaagtttaaataaggctagtccgttatcagcgtgaaaacgcggcaccgagtcggtgcaaagtcaaatttcctgtaataaaattgctatgtgtctgg

SEQ ID NO: 530 - RNA, 20 nt, synthetic construct
  misc_feature 1..20: note = Synthetic
  source 1..20: mol_type = other RNA
aagtcaacttcaatgtcgga

SEQ ID NO: 531 - RNA, 19 nt, synthetic construct
  misc_feature 1..19: note = Synthetic
  source 1..19: mol_type = other RNA
agtcaacttcaatgtcgga

SEQ ID NO: 532 - RNA, 18 nt, synthetic construct
  misc_feature 1..18: note = Synthetic
  source 1..18: mol_type = other RNA
gtcaacttcaatgtcgga

SEQ ID NO: 533 - RNA, 17 nt, synthetic construct
  misc_feature 1..17: note = Synthetic
  source 1..17: mol_type = other RNA
tcaacttcaatgtcgga

SEQ ID NO: 534-538 - skipped (5 entries)

SEQ ID NO: 539 - RNA, 10 nt, synthetic construct
  misc_feature 1..10: note = Synthetic
  source 1..10: mol_type = other RNA
gacattgaag

SEQ ID NO: 540 - RNA, 11 nt, synthetic construct
  misc_feature 1..11: note = Synthetic
  source 1..11: mol_type = other RNA
gacattgaagt

SEQ ID NO: 541 - RNA, 12 nt, synthetic construct
  misc_feature 1..12: note = Synthetic
  source 1..12: mol_type = other RNA
gacattgaagtt

SEQ ID NO: 542 - RNA, 13 nt, synthetic construct
  misc_feature 1..13: note = Synthetic
  source 1..13: mol_type = other RNA
gacattgaagttg

SEQ ID NO: 543 - RNA, 14 nt, synthetic construct
  misc_feature 1..14: note = Synthetic
  source 1..14: mol_type = other RNA
gacattgaagttga

SEQ ID NO: 544 - RNA, 15 nt, synthetic construct
  misc_feature 1..15: note = Synthetic
  source 1..15: mol_type = other RNA
gacattgaagttgac

SEQ ID NO: 545 - RNA, 16 nt, synthetic construct
  misc_feature 1..16: note = Synthetic
  source 1..16: mol_type = other RNA
gacattgaagttgact

SEQ ID NO: 546 - RNA, 17 nt, synthetic construct
  misc_feature 1..17: note = Synthetic
  source 1..17: mol_type = other RNA
gacattgaagttgactt

SEQ ID NO: 547 - RNA, 16 nt, synthetic construct
  misc_feature 1..16: note = Synthetic
  source 1..16: mol_type = other RNA
tcatccataataatcc

SEQ ID NO: 548 - RNA, 20 nt, synthetic construct
  misc_feature 1..20: note = Synthetic
  source 1..20: mol_type = other RNA
ggtttcatccataataatcc

SEQ ID NO: 549 - RNA, 24 nt, synthetic construct
  misc_feature 1..24: note = Synthetic
  source 1..24: mol_type = other RNA
tctgggtttcatccataataatcc

SEQ ID NO: 550 - RNA, 121 nt, synthetic construct
  misc_feature 1..121: note = Synthetic
  source 1..121: mol_type = other RNA
aagtcaacttcaatgtcggagtttaagagctagaaatagcaagtttaaataaggctagtccgttatcagcgtgaaaacgcggcaccgagtcggtgctcatccataataatccgacattgaa

SEQ ID NO: 551 - RNA, 125 nt, synthetic construct
  misc_feature 1..125: note = Synthetic
  source 1..125: mol_type = other RNA
aagtcaacttcaatgtcggagtttaagagctagaaatagcaagtttaaataaggctagtccgttatcagcgtgaaaacgcggcaccgagtcggtgcggtttcatccataataatccgacattgaa

SEQ ID NO: 552 - RNA, 129 nt, synthetic construct
  misc_feature 1..129: note = Synthetic
  source 1..129: mol_type = other RNA
aagtcaacttcaatgtcggagtttaagagctagaaatagcaagtttaaataaggctagtccgttatcagcgtgaaaacgcggcaccgagtcggtgctctgggtttcatccataataatccgacattgaa

SEQ ID NO: 553 - RNA, 124 nt, synthetic construct
  misc_feature 1..124: note = Synthetic
  source 1..124: mol_type = other RNA
aagtcaacttcaatgtcggagtttaagagctagaaatagcaagtttaaataaggctagtccgttatcagcgtgaaaacgcggcaccgagtcggtgctcatccataataatccgacattgaagtt

SEQ ID NO: 554 - RNA, 128 nt, synthetic construct
  misc_feature 1..128: note = Synthetic
  source 1..128: mol_type = other RNA
aagtcaacttcaatgtcggagtttaagagctagaaatagcaagtttaaataaggctagtccgttatcagcgtgaaaacgcggcaccgagtcggtgcggtttcatccataataatccgacattgaagtt

SEQ ID NO: 555 - RNA, 132 nt, synthetic construct
  misc_feature 1..132: note = Synthetic
  source 1..132: mol_type = other RNA
aagtcaacttcaatgtcggagtttaagagctagaaatagcaagtttaaataaggctagtccgttatcagcgtgaaaacgcggcaccgagtcggtgctctgggtttcatccataataatccgacattgaagtt

SEQ ID NO: 556 - RNA, 127 nt, synthetic construct
  misc_feature 1..127: note = Synthetic
  source 1..127: mol_type = other RNA
aagtcaacttcaatgtcggagtttaagagctagaaatagcaagtttaaataaggctagtccgttatcagcgtgaaaacgcggcaccgagtcggtgctcatccataataatccgacattgaagttgac

SEQ ID NO: 557 - RNA, 131 nt, synthetic construct
  misc_feature 1..131: note = Synthetic
  source 1..131: mol_type = other RNA
aagtcaacttcaatgtcggagtttaagagctagaaatagcaagtttaaataaggctagtccgttatcagcgtgaaaacgcggcaccgagtcggtgcggtttcatccataataatccgacattgaagttgac

SEQ ID NO: 558 - RNA, 135 nt, synthetic construct
  misc_feature 1..135: note = Synthetic
  source 1..135: mol_type = other RNA
aagtcaacttcaatgtcggagtttaagagctagaaatagcaagtttaaataaggctagtccgttatcagcgtgaaaacgcggcaccgagtcggtgctctgggtttcatccataataatccgacattgaagttgac

SEQ ID NO: 559 - RNA, 20 nt, synthetic construct
  misc_feature 1..20: note = Synthetic
  source 1..20: mol_type = other RNA
tttgactttccattctctgc

SEQ ID NO: 560 - RNA, 19 nt, synthetic construct
  misc_feature 1..19: note = Synthetic
  source 1..19: mol_type = other RNA
ttgactttccattctctgc

SEQ ID NO: 561 - RNA, 18 nt, synthetic construct
  misc_feature 1..18: note = Synthetic
  source 1..18: mol_type = other RNA
tgactttccattctctgc

SEQ ID NO: 562 - RNA, 17 nt, synthetic construct
  misc_feature 1..17: note = Synthetic
  source 1..17: mol_type = other RNA
gactttccattctctgc

SEQ ID NO: 563-567 - skipped (5 entries)

SEQ ID NO: 568 - RNA, 10 nt, synthetic construct
  misc_feature 1..10: note = Synthetic
  source 1..10: mol_type = other RNA
gagaatggaa

SEQ ID NO: 569 - RNA, 11 nt, synthetic construct
  misc_feature 1..11: note = Synthetic
  source 1..11: mol_type = other RNA
gagaatggaaa

SEQ ID NO: 570 - RNA, 12 nt, synthetic construct
  misc_feature 1..12: note = Synthetic
  source 1..12: mol_type = other RNA
gagaatggaaag

SEQ ID NO: 571 - RNA, 13 nt, synthetic construct
  misc_feature 1..13: note = Synthetic
  source 1..13: mol_type = other RNA
gagaatggaaagt

SEQ ID NO: 572 - RNA, 14 nt, synthetic construct
  misc_feature 1..14: note = Synthetic
  source 1..14: mol_type = other RNA
gagaatggaaagtc

SEQ ID NO: 573 - RNA, 15 nt, synthetic construct
  misc_feature 1..15: note = Synthetic
  source 1..15: mol_type = other RNA
gagaatggaaagtca

SEQ ID NO: 574 - RNA, 16 nt, synthetic construct
  misc_feature 1..16: note = Synthetic
  source 1..16: mol_type = other RNA
gagaatggaaagtcaa

SEQ ID NO: 575 - RNA, 17 nt, synthetic construct
  misc_feature 1..17: note = Synthetic
  source 1..17: mol_type = other RNA
gagaatggaaagtcaaa

SEQ ID NO: 576 - RNA, 16 nt, synthetic construct
  misc_feature 1..16: note = Synthetic
  source 1..16: mol_type = other RNA
tcatccataataagca

SEQ ID NO: 577 - RNA, 20 nt, synthetic construct
  misc_feature 1..20: note = Synthetic
  source 1..20: mol_type = other RNA
cacgtcatccataataagca

SEQ ID NO: 578 - RNA, 24 nt, synthetic construct
  misc_feature 1..24: note = Synthetic
  source 1..24: mol_type = other RNA
tactcacgtcatccataataagca

SEQ ID NO: 579 - RNA, 121 nt, synthetic construct
  misc_feature 1..121: note = Synthetic
  source 1..121: mol_type = other RNA
tttgactttccattctctgcgtttaagagctagaaatagcaagtttaaataaggctagtccgttatcagcgtgaaaacgcggcaccgagtcggtgctcatccataataagcagagaatgga

SEQ ID NO: 580 - RNA, 125 nt, synthetic construct
  misc_feature 1..125: note = Synthetic
  source 1..125: mol_type = other RNA
tttgactttccattctctgcgtttaagagctagaaatagcaagtttaaataaggctagtccgttatcagcgtgaaaacgcggcaccgagtcggtgccacgtcatccataataagcagagaatgga

SEQ ID NO: 581 - RNA, 129 nt, synthetic construct
  misc_feature 1..129: note = Synthetic
  source 1..129: mol_type = other RNA
tttgactttccattctctgcgtttaagagctagaaatagcaagtttaaataaggctagtccgttatcagcgtgaaaacgcggcaccgagtcggtgctactcacgtcatccataataagcagagaatgga

SEQ ID NO: 582 - RNA, 124 nt, synthetic construct
  misc_feature 1..124: note = Synthetic
  source 1..124: mol_type = other RNA
tttgactttccattctctgcgtttaagagctagaaatagcaagtttaaataaggctagtccgttatcagcgtgaaaacgcggcaccgagtcggtgctcatccataataagcagagaatggaaag

SEQ ID NO: 583 - RNA, 128 nt, synthetic construct
  misc_feature 1..128: note = Synthetic
  source 1..128: mol_type = other RNA
tttgactttccattctctgcgtttaagagctagaaatagcaagtttaaataaggctagtccgttatcagcgtgaaaacgcggcaccgagtcggtgccacgtcatccataataagcagagaatggaaag

SEQ ID NO: 584 - RNA, 132 nt, synthetic construct
  misc_feature 1..132: note = Synthetic
  source 1..132: mol_type = other RNA
tttgactttccattctctgcgtttaagagctagaaatagcaagtttaaataaggctagtccgttatcagcgtgaaaacgcggcaccgagtcggtgctactcacgtcatccataataagcagagaatggaaag

SEQ ID NO: 585 - RNA, 127 nt, synthetic construct
  misc_feature 1..127: note = Synthetic
  source 1..127: mol_type = other RNA
tttgactttccattctctgcgtttaagagctagaaatagcaagtttaaataaggctagtccgttatcagcgtgaaaacgcggcaccgagtcggtgctcatccataataagcagagaatggaaagtca

SEQ ID NO: 586 - RNA, 131 nt, synthetic construct
  misc_feature 1..131: note = Synthetic
  source 1..131: mol_type = other RNA
tttgactttccattctctgcgtttaagagctagaaatagcaagtttaaataaggctagtccgttatcagcgtgaaaacgcggcaccgagtcggtgccacgtcatccataataagcagagaatggaaagtca

SEQ ID NO: 587 - RNA, 135 nt, synthetic construct
  misc_feature 1..135: note = Synthetic
  source 1..135: mol_type = other RNA
tttgactttccattctctgcgtttaagagctagaaatagcaagtttaaataaggctagtccgttatcagcgtgaaaacgcggcaccgagtcggtgctactcacgtcatccataataagcagagaatggaaagtca

SEQ ID NO: 588 - RNA, 20 nt, synthetic construct
  misc_feature 1..20: note = Synthetic
  source 1..20: mol_type = other RNA
cgtgagtaaacctgaatctt

SEQ ID NO: 589 - RNA, 19 nt, synthetic construct
  misc_feature 1..19: note = Synthetic
  source 1..19: mol_type = other RNA
gtgagtaaacctgaatctt

SEQ ID NO: 590 - RNA, 18 nt, synthetic construct
  misc_feature 1..18: note = Synthetic
  source 1..18: mol_type = other RNA
tgagtaaacctgaatctt

SEQ ID NO: 591 - RNA, 17 nt, synthetic construct
  misc_feature 1..17: note = Synthetic
  source 1..17: mol_type = other RNA
gagtaaacctgaatctt

SEQ ID NO: 592-596 - skipped (5 entries)

SEQ ID NO: 597 - RNA, 10 nt, synthetic construct
  misc_feature 1..10: note = Synthetic
  source 1..10: mol_type = other RNA
attcaggttt

SEQ ID NO: 598 - RNA, 11 nt, synthetic construct
  misc_feature 1..11: note = Synthetic
  source 1..11: mol_type = other RNA
attcaggttta

SEQ ID NO: 599 - RNA, 12 nt, synthetic construct
  misc_feature 1..12: note = Synthetic
  source 1..12: mol_type = other RNA
attcaggtttac

SEQ ID NO: 600 - RNA, 13 nt, synthetic construct
  misc_feature 1..13: note = Synthetic
  source 1..13: mol_type = other RNA
attcaggtttact

SEQ ID NO: 601 - RNA, 14 nt, synthetic construct
  misc_feature 1..14: note = Synthetic
  source 1..14: mol_type = other RNA
attcaggtttactc

SEQ ID NO: 602 - RNA, 15 nt, synthetic construct
  misc_feature 1..15: note = Synthetic
  source 1..15: mol_type = other RNA
attcaggtttactca

SEQ ID NO: 603 - RNA, 16 nt, synthetic construct
  misc_feature 1..16: note = Synthetic
  source 1..16: mol_type = other RNA
attcaggtttactcac

SEQ ID NO: 604 - RNA, 17 nt, synthetic construct
  misc_feature 1..17: note = Synthetic
  source 1..17: mol_type = other RNA
attcaggtttactcacg

SEQ ID NO: 605 - RNA, 16 nt, synthetic construct
  misc_feature 1..16: note = Synthetic
  source 1..16: mol_type = other RNA
tactccataataaaag

SEQ ID NO: 606 - RNA, 20 nt, synthetic construct
  misc_feature 1..20: note = Synthetic
  source 1..20: mol_type = other RNA
caggtactccataataaaag

SEQ ID NO: 607 - RNA, 24 nt, synthetic construct
  misc_feature 1..24: note = Synthetic
  source 1..24: mol_type = other RNA
tcctcaggtactccataataaaag

SEQ ID NO: 608 - RNA, 121 nt, synthetic construct
  misc_feature 1..121: note = Synthetic
  source 1..121: mol_type = other RNA
cgtgagtaaacctgaatcttgtttaagagctagaaatagcaagtttaaataaggctagtccgttatcagcgtgaaaacgcggcaccgagtcggtgctactccataataaaagattcaggtt

SEQ ID NO: 609 - RNA, 125 nt, synthetic construct
  misc_feature 1..125: note = Synthetic
  source 1..125: mol_type = other RNA
cgtgagtaaacctgaatcttgtttaagagctagaaatagcaagtttaaataaggctagtccgttatcagcgtgaaaacgcggcaccgagtcggtgccaggtactccataataaaagattcaggtt

SEQ ID NO: 610 - RNA, 129 nt, synthetic construct
  misc_feature 1..129: note = Synthetic
  source 1..129: mol_type = other RNA
cgtgagtaaacctgaatcttgtttaagagctagaaatagcaagtttaaataaggctagtccgttatcagcgtgaaaacgcggcaccgagtcggtgctcctcaggtactccataataaaagattcaggtt

SEQ ID NO: 611 - RNA, 124 nt, synthetic construct
  misc_feature 1..124: note = Synthetic
  source 1..124: mol_type = other RNA
cgtgagtaaacctgaatcttgtttaagagctagaaatagcaagtttaaataaggctagtccgttatcagcgtgaaaacgcggcaccgagtcggtgctactccataataaaagattcaggtttac

SEQ ID NO: 612 - RNA, 128 nt, synthetic construct
  misc_feature 1..128: note = Synthetic
  source 1..128: mol_type = other RNA
cgtgagtaaacctgaatcttgtttaagagctagaaatagcaagtttaaataaggctagtccgttatcagcgtgaaaacgcggcaccgagtcggtgccaggtactccataataaaagattcaggtttac

SEQ ID NO: 613 - RNA, 132 nt, synthetic construct
  misc_feature 1..132: note = Synthetic
  source 1..132: mol_type = other RNA
cgtgagtaaacctgaatcttgtttaagagctagaaatagcaagtttaaataaggctagtccgttatcagcgtgaaaacgcggcaccgagtcggtgctcctcaggtactccataataaaagattcaggtttac

SEQ ID NO: 614 - RNA, 127 nt, synthetic construct
  misc_feature 1..127: note = Synthetic
  source 1..127: mol_type = other RNA
cgtgagtaaacctgaatcttgtttaagagctagaaatagcaagtttaaataaggctagtccgttatcagcgtgaaaacgcggcaccgagtcggtgctactccataataaaagattcaggtttactca

SEQ ID NO: 615 - RNA, 131 nt, synthetic construct
  misc_feature 1..131: note = Synthetic
  source 1..131: mol_type = other RNA
cgtgagtaaacctgaatcttgtttaagagctagaaatagcaagtttaaataaggctagtccgttatcagcgtgaaaacgcggcaccgagtcggtgccaggtactccataataaaagattcaggtttactca

SEQ ID NO: 616 - RNA, 135 nt, synthetic construct
  misc_feature 1..135: note = Synthetic
  source 1..135: mol_type = other RNA
cgtgagtaaacctgaatcttgtttaagagctagaaatagcaagtttaaataaggctagtccgttatcagcgtgaaaacgcggcaccgagtcggtgctcctcaggtactccataataaaagattcaggtttactca

SEQ ID NO: 617 - RNA, 20 nt, synthetic construct
  misc_feature 1..20: note = Synthetic
  source 1..20: mol_type = other RNA
cagtaagtcaacttcaatgt

SEQ ID NO: 618 - RNA, 19 nt, synthetic construct
  misc_feature 1..19: note = Synthetic
  source 1..19: mol_type = other RNA
agtaagtcaacttcaatgt

SEQ ID NO: 619 - RNA, 18 nt, synthetic construct
  misc_feature 1..18: note = Synthetic
  source 1..18: mol_type = other RNA
gtaagtcaacttcaatgt

SEQ ID NO: 620 - RNA, 17 nt, synthetic construct
  misc_feature 1..17: note = Synthetic
  source 1..17: mol_type = other RNA
taagtcaacttcaatgt

SEQ ID NO: 621-625 - skipped (5 entries)

SEQ ID NO: 626 - RNA, 10 nt, synthetic construct
  misc_feature 1..10: note = Synthetic
  source 1..10: mol_type = other RNA
ttgaagttga

SEQ ID NO: 627 - RNA, 11 nt, synthetic construct
  misc_feature 1..11: note = Synthetic
  source 1..11: mol_type = other RNA
ttgaagttgac

SEQ ID NO: 628 - RNA, 12 nt, synthetic construct
  misc_feature 1..12: note = Synthetic
  source 1..12: mol_type = other RNA
ttgaagttgact

SEQ ID NO: 629 - RNA, 13 nt, synthetic construct
  misc_feature 1..13: note = Synthetic
  source 1..13: mol_type = other RNA
ttgaagttgactt

SEQ ID NO: 630 - RNA, 14 nt, synthetic construct
  misc_feature 1..14: note = Synthetic
  source 1..14: mol_type = other RNA
ttgaagttgactta

SEQ ID NO: 631 - RNA, 15 nt, synthetic construct
  misc_feature 1..15: note = Synthetic
  source 1..15: mol_type = other RNA
ttgaagttgacttac

SEQ ID NO: 632 - RNA, 16 nt, synthetic construct
  misc_feature 1..16: note = Synthetic
  source 1..16: mol_type = other RNA
ttgaagttgacttact

SEQ ID NO: 633 - RNA, 17 nt, synthetic construct
  misc_feature 1..17: note = Synthetic
  source 1..17: mol_type = other RNA
ttgaagttgacttactg

SEQ ID NO: 634 - RNA, 16 nt, synthetic construct
  misc_feature 1..16: note = Synthetic
  source 1..16: mol_type = other RNA
ccatccgactaataaa

SEQ ID NO: 635 - RNA, 20 nt, synthetic construct
  misc_feature 1..20: note = Synthetic
  source 1..20: mol_type = other RNA
tcatccatccgactaataaa

SEQ ID NO: 636 - RNA, 24 nt, synthetic construct
  misc_feature 1..24: note = Synthetic
  source 1..24: mol_type = other RNA
ggtttcatccatccgactaataaa

SEQ ID NO: 637 - RNA, 121 nt, synthetic construct
  misc_feature 1..121: note = Synthetic
  source 1..121: mol_type = other RNA
cagtaagtcaacttcaatgtgtttaagagctagaaatagcaagtttaaataaggctagtccgttatcagcgtgaaaacgcggcaccgagtcggtgcccatccgactaataaattgaagttg

SEQ ID NO: 638 - RNA, 125 nt, synthetic construct
  misc_feature 1..125: note = Synthetic
  source 1..125: mol_type = other RNA
cagtaagtcaacttcaatgtgtttaagagctagaaatagcaagtttaaataaggctagtccgttatcagcgtgaaaacgcggcaccgagtcggtgctcatccatccgactaataaattgaagttg

SEQ ID NO: 639 - RNA, 129 nt, synthetic construct
  misc_feature 1..129: note = Synthetic
  source 1..129: mol_type = other RNA
cagtaagtcaacttcaatgtgtttaagagctagaaatagcaagtttaaataaggctagtccgttatcagcgtgaaaacgcggcaccgagtcggtgcggtttcatccatccgactaataaattgaagttg

SEQ ID NO: 640 - RNA, 124 nt, synthetic construct
  misc_feature 1..124: note = Synthetic
  source 1..124: mol_type = other RNA
cagtaagtcaacttcaatgtgtttaagagctagaaatagcaagtttaaataaggctagtccgttatcagcgtgaaaacgcggcaccgagtcggtgcccatccgactaataaattgaagttgact

SEQ ID NO: 641 - RNA, 128 nt, synthetic construct
  misc_feature 1..128: note = Synthetic
  source 1..128: mol_type = other RNA
cagtaagtcaacttcaatgtgtttaagagctagaaatagcaagtttaaataaggctagtccgttatcagcgtgaaaacgcggcaccgagtcggtgctcatccatccgactaataaattgaagttgact

SEQ ID NO: 642 - RNA, 132 nt, synthetic construct
  misc_feature 1..132: note = Synthetic
  source 1..132: mol_type = other RNA
cagtaagtcaacttcaatgtgtttaagagctagaaatagcaagtttaaataaggctagtccgttatcagcgtgaaaacgcggcaccgagtcggtgcggtttcatccatccgactaataaattgaagttgact

SEQ ID NO: 643 - RNA, 127 nt, synthetic construct
  misc_feature 1..127: note = Synthetic
  source 1..127: mol_type = other RNA
cagtaagtcaacttcaatgtgtttaagagctagaaatagcaagtttaaataaggctagtccgttatcagcgtgaaaacgcggcaccgagtcggtgcccatccgactaataaattgaagttgacttac

SEQ ID NO: 644 - RNA, 131 nt, synthetic construct
  misc_feature 1..131: note = Synthetic
  source 1..131: mol_type = other RNA
cagtaagtcaacttcaatgtgtttaagagctagaaatagcaagtttaaataaggctagtccgttatcagcgtgaaaacgcggcaccgagtcggtgctcatccatccgactaataaattgaagttgacttac

SEQ ID NO: 645 - RNA, 135 nt, synthetic construct
  misc_feature 1..135: note = Synthetic
  source 1..135: mol_type = other RNA
cagtaagtcaacttcaatgtgtttaagagctagaaatagcaagtttaaataaggctagtccgttatcagcgtgaaaacgcggcaccgagtcggtgcggtttcatccatccgactaataaattgaagttgacttac

SEQ ID NO: 646 - RNA, 76 nt, synthetic construct
  misc_feature 1..76: note = Synthetic
  source 1..76: mol_type = other RNA
gttttagagctagaaatagcaagttaaaataaggctagtccgttatcaacttgaaaaagtggcaccgagtcggtgc

SEQ ID NO: 647 - RNA, 78 nt, synthetic construct
  misc_feature 1..78: note = Synthetic
  source 1..78: mol_type = other RNA
gtttaagagcggggaaatccgcaagtttaaataaggctagtccgttatcagcgtgaaaacgcggcaccgagtcggtgc

SEQ ID NO: 648 - RNA, 76 nt, synthetic construct
  misc_feature 1..76: note = Synthetic
  source 1..76: mol_type = other RNA
gtttgagagctagaaatagcaagtttaaataaggctagtccgttatcaacttgaaaaagtgggaccgagtcggtcc

SEQ ID NO: 649 - RNA, 86 nt, synthetic construct
  misc_feature 1..86: note = Synthetic
  source 1..86: mol_type = other RNA
gtttaagagctatgctggaaacagcatagcaagtttaaataaggctagtccgttatcaacttgaaaaagtggcaccgagtcggtgc

SEQ ID NO: 650 - RNA, 76 nt, synthetic construct
  misc_feature 1..76: note = Synthetic
  source 1..76: mol_type = other RNA
gttttagtactctggaaacagaatctactaaaacaaggcaaaatgccgtgtttatctcgtcaacttgttggcgaga

SEQ ID NO: 651 - RNA, 76 nt, synthetic construct
  misc_feature 1..76: note = Synthetic
  source 1..76: mol_type = other RNA
gttttagtactctggaaacagaatctactgaaacaagacaatatgtcgtgtttatcccatcaatttattggtggga

SEQ ID NO: 652 - RNA, 76 nt, synthetic construct
  misc_feature 1..76: note = Synthetic
  source 1..76: mol_type = other RNA
gtttaagagctagaaatagcaagtttaaataaggctagtccgttatcaacttgaaaaagtggcaccgagtcggtgc

SEQ ID NO: 653 - RNA, 76 nt, synthetic construct
  misc_feature 1..76: note = Synthetic
  source 1..76: mol_type = other RNA
gtttaagagctagaaatagcaagtttaaataaggctagtccgttatcagcgtgaaaacgcggcaccgagtcggtgc

SEQ ID NO: 654 - RNA, 86 nt, synthetic construct
  misc_feature 1..86: note = Synthetic
  source 1..86: mol_type = other RNA
gtttaagagctatgctggaaacagcatagcaagtttaaataaggctagtccgttatcagcgtgaaaacgcggcaccgagtcggtgc

SEQ ID NO: 655 - skipped

SEQ ID NO: 656 - RNA, 76 nt, synthetic construct
  misc_feature 1..76: note = Synthetic
  source 1..76: mol_type = other RNA
gttttagagctatacgtagcaagttaaaataaggctagtccgttatcaactttacgaagtggcaccgagtcggtgc

SEQ ID NO: 657 - RNA, 76 nt, synthetic construct
  misc_feature 1..76: note = Synthetic
  source 1..76: mol_type = other RNA
gttttagagctatacgtagcaagttaaaataaggctagtccgttatcaactttacgaagtgggaccgagtcggtcc

SEQ ID NO: 658 - RNA, 88 nt, synthetic construct
  misc_feature 1..88: note = Synthetic
  source 1..88: mol_type = other RNA
gttttagagctagctcatgaaaatgagctagcaagttaaaataaggctagtccgttatcaacttgaaaaagtgggaccgagtcggtcc

SEQ ID NO: 659 - skipped

SEQ ID NO: 660 - RNA, 86 nt, synthetic construct
  misc_feature 1..86: note = Synthetic
  source 1..86: mol_type = other RNA
gttttagagctatgctggaaacagcatagcaagttaaaataaggctagtccgttatcaacttgaaaaagtggcaccgagtcggtgc

SEQ ID NO: 661-670 - skipped (10 entries)

SEQ ID NO: 671 - protein, 677 aa, synthetic construct
  REGION 1..677: note = Synthetic
TLNIEDEHRLHETSKEPDVSLGSTWLSDFPQAWAETGGMGLAVRQAPLIIPLKATSTPVSIKQYPMSQEARLGIKPHIQRLLDQGILVPCQSPWNTPLLPVKKPGTNDYRPVQDLREVNKRVEDIHPTVPNPYNLLSGLPPSHQWYTVLDLKDAFFCLRLHPTSQPLFAFEWRDPEMGISGQLTWTRLPQGFKNSPTLFDEALHRDLADFRIQHPDLILLQYVDDLLLAATSELDCQQGTRALLQTLGNLGYRASAKKAQICQKQVKYLGYLLKEGQRWLTEARKETVMGQPTPKTPRQLREFLGTAGFCRLWIPGFAEMAAPLYPLTKTGTLFNWGPDQQKAYQEIKQALLTAPALGLPDLTKPFELFVDEKQGYAKGVLTQKLGPWRRPVAYLSKKLDPVAAGWPPCLRMVAAIAVLTKDAGKLTMGQPLVILAPHAVEALVKQPPDRWLSNARMTHYQALLLDTDRVQFGPVVALNPATLLPLPEEGLQHNCLDILAEAHGTRPDLTDQPLPDADHTWYTDGSSLLQEGQRKAGAAVTTETEVIWAKALPAGTSAQRAELIALTQALKMAEGKKLNVYTDSRYAFATAHIHGEIYRRRGLLTSEGKEIKNKDEILALLKALFLPKRLSIIHCPGHQKGHSAEARGNRMADQAARKAAITETPDTSTLLIENSSP

SEQ ID NO: 672 - protein, 677 aa, synthetic construct
  REGION 1..677: note = Synthetic
TLNIEDEYRLHETSKEPDVSLGSTWLSDFPQAWAETGGMGLAVRQAPLIIPLKATSTPVSIKQYPMSQEARLGIKPHIQRLLDQGILVPCQSPWNTPLLPVKKPGTNDYRPVQDLREVNKRVEDIHPTVPNPYNLLSGLPPSHQWYTVLDLKDAFFCLRLHPTSQPLFAFEWRDPEMGISGQLTWTRLPQGFKNSPTLFDEALHRDLADFRIQHPDLILLQYVDDLLLAATSELDCQQGTRALLQTLGNLGYRASAKKAQICQKQVKYLGYLLKEGQRWLTEARKETVMGQPTPKTPRQLREFLGTAGFCRLWIPGFAEMAAPLYPLTKTGTLFNWGPDQQKAYQEIKQALLTAPALGLPDLTKPFELFVDEKQGYAKGVLTQKLGPWRRPVAYLSKKLDPVAAGWPPCLRMVAAIAVLTKDAGKLTMGQPLVILAPHAVEALVKQPPDRWLSNARMTHYQALLLDTDRVQFGPVVALNPATLLPLPEEGLQHNCLDILAEAHGTRPDLTDQPLPDADHTWYTDGSSLLQEGQRKAGAAVTTETEVIWAKALPAGTSAQRAELIALTQALKMAEGKKLNVYTDSRYAFATAHIHGEIYRRRGLLTSEGKEIKNKDEILALLKALFLPKRLSIIHCPGHQKGHSAEARGNRMADQAARKAAITETPDTSTLLIENSSP

SEQ ID NO: 673 - protein, 677 aa, synthetic construct
  REGION 1..677: note = Synthetic
TLNIEDEYRLHETSKEPDVSLGSTWLSDFPQAWAETGGMGLAVRQAPLIIPLKATSTPVSIKQYPMSQEARLGIKPHIQRLLDQGILVPCQSPWNTPLLPVKKPGTNDYRPVQDLREVNKRVEDIHPTVPNPYNLLSGLPPSHQWYTVLDLKDAFFCLRLHPTSQPLFAFEWRDPEMGISGQLTWTRLPQGFKNSPTLFNEALHRDLADFRIQHPDLILLQYVDDLLLAATSELDCQQGTRALLQTLGNLGYRASAKKAQICQKQVKYLGYLLKEGQRWLTEARKETVMGQPTPKTPRQLREFLGKAGFCRLFIPGFAEMAAPLYPLTKPGTLFNWGPDQQKAYQEIKQALLTAPALGLPDLTKPFELFVDEKQGYAKGVLTQKLGPWRRPVAYLSKKLDPVAAGWPPCLRMVAAIAVLTKDAGKLTMGQPLVILAPHAVEALVKQPPDRWLSNARMTHYQALLLDTDRVQFGPVVALNPATLLPLPEEGLQHNCLDILAEAHGTRPDLTDQPLPDADHTWYTDGSSLLQEGQRKAGAAVTTETEVIWAKALPAGTSAQRAELIALTQALKMAEGKKLNVYTDSRYAFATAHIHGEIYRRRGWLTSEGKEIKNKDEILALLKALFLPKRLSIIHCPGHQKGHSAEARGNRMADQAARKAAITETPDTSTLLIENSSP

SEQ ID NO: 674 - protein, 1368 aa, Streptococcus pyogenes [sequence omitted]

SEQ ID NO: 675 - protein, 1368 aa, synthetic construct
  REGION 1..1368: note = Synthetic
MDKKYSIGLDIGTNSVGWAVITDEYKVPSKKFKVLGNTDRHSIKKNLIGALLFDSGETAEATRLKRTARRRYTRRKNRICYLQEIFSNEMAKVDDSFFHRLEESFLVEEDKKHERHPIFGNIVDEVAYHEKYPTIYHLRKKLVDSTDKADLRLIYLALAHMIKFRGHFLIEGDLNPDNSDVDKLFIQLVQTYNQLFEENPINASGVDAKAILSARLSKSRRLENLIAQLPGEKKNGLFGNLIALSLGLTPNFKSNFDLAEDAKLQLSKDTYDDDLDNLLAQIGDQYADLFLAAKNLSDAILLSDILRVNTEITKAPLSASMIKRYDEHHQDLTLLKALVRQQLPEKYKEIFFDQSKNGYAGYIDGGASQEEFYKFIKPILEKMDGTEELLVKLNREDLLRKQRTFDNGSIPHQIHLGELHAILRRQEDFYPFLKDNREKIEKILTFRIPYYVGPLARGNSRFAWMTRKSEETITPWNFEEVVDKGASAQSFIERMTNFDKNLPNEKVLPKHSLLYEYFTVYNELTKVKYVTEGMRKPAFLSGEQKKAIVDLLFKTNRKVTVKQLKEDYFKKIECFDSVEISGVEDRFNASLGTYHDLLKIIKDKDFLDNEENEDILEDIVLTLTLFEDREMIEERLKTYAHLFDDKVMKQLKRRRYTGWGRLSRKLINGIRDKQSGKTILDFLKSDGFANRNFMQLIHDDSLTFKEDIQKAQVSGQGDSLHEHIANLAGSPAIKKGILQTVKVVDELVKVMGRHKPENIVIEMARENQTTQKGQKNSRERMKRIEEGIKELGSQILKEHPVENTQLQNEKLYLYYLQNGRDMYVDQELDINRLSDYDVDAIVPQSFLKDDSIDNKVLTRSDKNRGKSDNVPSEEVVKKMKNYWRQLLNAKLITQRKFDNLTKAERGGLSELDKAGFIKRQLVETRQITKHVAQILDSRMNTKYDENDKLIREVKVITLKSKLVSDFRKDFQFYKVREINNYHHAHDAYLNAVVGTALIKKYPKLESEFVYGDYKVYDVRKMIAKSEQEIGKATAKYFFYSNIMNFFKTEITLANGEIRKRPLIETNGETGEIVWDKGRDFATVRKVLSMPQVNIVKKTEVQTGGFSKESILPKRNSDKLIARKKDWDPKKYGGFDSPTVAYSVLVVAKVEKGKSKKLKSVKELLGITIMERSSFEKNPIDFLEAKGYKEVKKDLIIKLPKYSLFELENGRKRMLASAGELQKGNELALPSKYVNFLYLASHYEKLKGSPEDNEQKQLFVEQHKHYLDEIIEQISEFSKRVILADANLDKVLSAYNKHRDKPIREQAENIIHLFTLTNLGAPAAFKYFDTTIDRKRYTSTKEVLDATLIHQSITGLYETRIDLSQLGGD

SEQ ID NO: 676 - protein, 1367 aa, synthetic construct
  REGION 1..1367: note = Synthetic
DKKYSIGLDIGTNSVGWAVITDEYKVPSKKFKVLGNTDRHSIKKNLIGALLFDSGETAEATRLKRTARRRYTRRKNRICYLQEIFSNEMAKVDDSFFHRLEESFLVEEDKKHERHPIFGNIVDEVAYHEKYPTIYHLRKKLVDSTDKADLRLIYLALAHMIKFRGHFLIEGDLNPDNSDVDKLFIQLVQTYNQLFEENPINASGVDAKAILSARLSKSRRLENLIAQLPGEKKNGLFGNLIALSLGLTPNFKSNFDLAEDAKLQLSKDTYDDDLDNLLAQIGDQYADLFLAAKNLSDAILLSDILRVNTEITKAPLSASMIKRYDEHHQDLTLLKALVRQQLPEKYKEIFFDQSKNGYAGYIDGGASQEEFYKFIKPILEKMDGTEELLVKLNREDLLRKQRTFDNGSIPHQIHLGELHAILRRQEDFYPFLKDNREKIEKILTFRIPYYVGPLARGNSRFAWMTRKSEETITPWNFEEVVDKGASAQSFIERMTNFDKNLPNEKVLPKHSLLYEYFTVYNELTKVKYVTEGMRKPAFLSGEQKKAIVDLLFKTNRKVTVKQLKEDYFKKIECFDSVEISGVEDRFNASLGTYHDLLKIIKDKDFLDNEENEDILEDIVLTLTLFEDREMIEERLKTYAHLFDDKVMKQLKRRRYTGWGRLSRKLINGIRDKQSGKTILDFLKSDGFANRNFMQLIHDDSLTFKEDIQKAQVSGQGDSLHEHIANLAGSPAIKKGILQTVKVVDELVKVMGRHKPENIVIEMARENQTTQKGQKNSRERMKRIEEGIKELGSQILKEHPVENTQLQNEKLYLYYLQNGRDMYVDQELDINRLSDYDVDAIVPQSFLKDDSIDNKVLTRSDKNRGKSDNVPSEEVVKKMKNYWRQLLNAKLITQRKFDNLTKAERGGLSELDKAGFIKRQLVETRQITKHVAQILDSRMNTKYDENDKLIREVKVITLKSKLVSDFRKDFQFYKVREINNYHHAHDAYLNAVVGTALIKKYPKLESEFVYGDYKVYDVRKMIAKSEQEIGKATAKYFFYSNIMNFFKTEITLANGEIRKRPLIETNGETGEIVWDKGRDFATVRKVLSMPQVNIVKKTEVQTGGFSKESILPKRNSDKLIARKKDWDPKKYGGFDSPTVAYSVLVVAKVEKGKSKKLKSVKELLGITIMERSSFEKNPIDFLEAKGYKEVKKDLIIKLPKYSLFELENGRKRMLASAGELQKGNELALPSKYVNFLYLASHYEKLKGSPEDNEQKQLFVEQHKHYLDEIIEQISEFSKRVILADANLDKVLSAYNKHRDKPIREQAENIIHLFTLTNLGAPAAFKYFDTTIDRKRYTSTKEVLDATLIHQSITGLYETRIDLSQLGGD

SEQ ID NO: 677 - protein, 1367 aa, synthetic construct
  REGION 1..1367: note = Synthetic
DKKYSIGLDIGTNSVGWAVITDEYKVPSKKFKVLGNTDRHSIKKNLIGALLFDSGETAEATRLKRTARRRYTRRKNRICYLQEIFSNEMAKVDDSFFHRLEESFLVEEDKKHERHPIFGNIVDEVAYHEKYPTIYHLRKKLVDSTDKADLRLIYLALAHMIKFRGHFLIEGDLNPDNSDVDKLFIQLVQTYNQLFEENPINASGVDAKAILSARLSKSRKLENLIAQLPGEKKNGLFGNLIALSLGLTPNFKSNFDLAEDAKLQLSKDTYDDDLDNLLAQIGDQYADLFLAAKNLSDAILLSDILRVNTEITKAPLSASMIKRYDEHHQDLTLLKALVRQQLPEKYKEIFFDQSKNGYAGYIDGGASQEEFYKFIKPILEKMDGTEELLVKLKREDLLRKQRTFDNGSIPHQIHLGELHAILRRQEDFYPFLKDNREKIEKILTFRIPYYVGPLARGNSRFAWMTRKSEETITPWNFEEVVDKGASAQSFIERMTNFDKNLPNEKVLPKHSLLYEYFTVYNELTKVKYVTEGMRKPAFLSGEQKKAIVDLLFKTNRKVTVKQLKEDYFKKIECFDSVEISGVEDRFNASLGTYHDLLKIIKDKDFLDNEENEDILEDIVLTLTLFEDREMIEERLKTYAHLFDDKVMKQLKRRRYTGWGRLSRKLINGIRDKQSGKTILDFLKSDGFANRNFMQLIHDDSLTFKEDIQKAQVSGQGDSLHEHIANLAGSPAIKKGILQTVKVVDELVKVMGRHKPENIVIEMARENQTTQKGQKNSRERMKRIEEGIKELGSQILKEHPVENTQLQNEKLYLYYLQNGRDMYVDQELDINRLSDYDVDAIVPQSFLKDDSIDNKVLTRSDKNRGKSDNVPSEEVVKKMKNYWRQLLNAKLITQRKFDNLTKAERGGLSELDKAGFIKRQLVETRQITKHVAQILDSRMNTKYDENDKLIREVKVITLKSKLVSDFRKDFQFYKVREINNYHHAHDAYLNAVVGTALIKKYPKLESEFVYGDYKVYDVRKMIAKSEQEIGKATAKYFFYSNIMNFFKTEITLANGEIRKRPLIETNGETGEIVWDKGRDFATVRKVLSMPQVNIVKKTEVQTGGFSKESILPKRNSDKLIARKKDWDPKKYGGFDSPTVAYSVLVVAKVEKGKSKKLKSVKELLGITIMERSSFEKNPIDFLEAKGYKEVKKDLIIKLPKYSLFELENGRKRMLASAGELQKGNELALPSKYVNFLYLASHYEKLKGSPEDNEQKQLFVEQHKHYLDEIIEQISEFSKRVILADANLDKVLSAYNKHRDKPIREQAENIIHLFTLTNLGAPAAFKYFDTTIDRKRYTSTKEVLDATLIHQSITGLYETRIDLSQLGGD

SEQ ID NO: 678 - protein, 1054 aa, Staphylococcus lugdunensis
MNQKFILGLDIGITSVGYGLIDYETKNIIDAGVRLFPEANVENNEGRRSKRGSRRLKRRRIHRLERVKKLLEDYNLLDQSQIPQSTNPYAIRVKGLSEALSKDELVIALLHIAKRRGIHKIDVIDSNDDVGNELSTKEQLNKNSKLLKDKFVCQIQLERMNEGQVRGEKNRFKTADIIKEIIQLLNVQKNFHQLDENFINKYIELVEMRREYFEGPGKGSPYGWEGDPKAWYETLMGHCTYFPDELRSVKYAYSADLFNALNDLNNLVIQRDGLSKLEYHEKYHIIENVFKQKKKPTLKQIANEINVNPEDIKGYRITKSGKPQFTEFKLYHDLKSVLFDQSILENEDVLDQIAEILTIYQDKDSIKSKLTELDILLNEEDKENIAQLTGYTGTHRLSLKCIRLVLEEQWYSSRNQMEIFTHLNIKPKKINLTAANKIPKAMIDEFILSPVVKRTFGQAINLINKIIEKYGVPEDIIIELARENNSKDKQKFINEMQKKNENTRKRINEIIGKYGNQNAKRLVEKIRLHDEQEGKCLYSLESIPLEDLLNNPNHYEVDHIIPRSVSFDNSYHNKVLVKQSENSKKSNLTPYQYFNSGKSKLSYNQFKQHILNLSKSQDRISKKKKEYLLEERDINKFEVQKEFINRNLVDTRYATRELTNYLKAYFSANNMNVKVKTINGSFTDYLRKVWKFKKERNHGYKHHAEDALIIANADFLFKENKKLKAVNSVLEKPEIESKQLDIQVDSEDNYSEMFIIPKQVQDIKDFRNFKYSHRVDKKPNRQLINDTLYSTRKKDNSTYIVQTIKDIYAKDNTTLKKQFDKSPEKFLMYQHDPRTFEKLEVIMKQYANEKNPLAKYHEETGEYLTKYSKKNNGPIVKSLKYIGNKLGSHLDVTHQFKSSTKKLVKLSIKPYRFDVYLTDKGYKFITISYLDVLKKDNYYYIPEQKYDKLKLGKAIDKNAKFIASFYKNDLIKLDGEIYKIIGVNSDTRNMIELDLPDIRYKEYCELNNIKGEPRIKKTIGKKVNSIEKLTTDVLGNVFTNTQYTKPQLLFKRGN

SEQ ID NO: 679 - protein, 1054 aa, synthetic construct
  REGION 1..1054: note = Synthetic
MNQKFILGLDIGITSVGYGLIDYETKNIIDAGVRLFPEANVENNEGRRSKRGSRRLKRRRIHRLERVKKLLEDYNLLDQSQIPQSTNPYAIRVKGLSEALSKDELVIALLHIAKRRGIHKIDVIDSNDDVGNELSTKEQLNKNSKLLKDKFVCQIQLERMNEGQVRGEKNRFKTADIIKEIIQLLNVQKNFHQLDENFINKYIELVEMRREYFEGPGKGSPYGWEGDPKAWYETLMGHCTYFPDELRSVKYAYSADLFNALNDLNNLVIQRDGLSKLEYHEKYHIIENVFKQKKKPTLKQIANEINVNPEDIKGYRITKSGKPQFTEFKLYHDLKSVLFDQSILENEDVLDQIAEILTIYQDKDSIKSKLTELDILLNEEDKENIAQLTGYTGTHRLSLKCIRLVLEEQWYSSRNQMEIFTHLNIKPKKINLTAANKIPKAMIDEFILSPVVKRTFGQAINLINKIIEKYGVPEDIIIELARENNSKDKQKFINEMQKKNENTRKRINEIIGKYGNQNAKRLVEKIRLHDEQEGKCLYSLESIPLEDLLNNPNHYEVDHIIPRSVSFDNSYHNKVLVKQSEASKKSNLTPYQYFNSGKSKLSYNQFKQHILNLSKSQDRISKKKKEYLLEERDINKFEVQKEFINRNLVDTRYATRELTNYLKAYFSANNMNVKVKTINGSFTDYLRKVWKFKKERNHGYKHHAEDALIIANADFLFKENKKLKAVNSVLEKPEIESKQLDIQVDSEDNYSEMFIIPKQVQDIKDFRNFKYSHRVDKKPNRQLINDTLYSTRKKDNSTYIVQTIKDIYAKDNTTLKKQFDKSPEKFLMYQHDPRTFEKLEVIMKQYANEKNPLAKYHEETGEYLTKYSKKNNGPIVKSLKYIGNKLGSHLDVTHQFKSSTKKLVKLSIKPYRFDVYLTDKGYKFITISYLDVLKKDNYYYIPEQKYDKLKLGKAIDKNAKFIASFYKNDLIKLDGEIYKIIGVNSDTRNMIELDLPDIRYKEYCELNNIKGEPRIKKTIGKKVNSIEKLTTDVLGNVFTNTQYTKPQLLFKRGN

SEQ ID NO: 680 - protein, 1053 aa, synthetic construct
  REGION 1..1053: note = Synthetic
NQKFILGLDIGITSVGYGLIDYETKNIIDAGVRLFPEANVENNEGRRSKRGSRRLKRRRIHRLERVKKLLEDYNLLDQSQIPQSTNPYAIRVKGLSEALSKDELVIALLHIAKRRGIHKIDVIDSNDDVGNELSTKEQLNKNSKLLKDKFVCQIQLERMNEGQVRGEKNRFKTADIIKEIIQLLNVQKNFHQLDENFINKYIELVEMRREYFEGPGKGSPYGWEGDPKAWYETLMGHCTYFPDELRSVKYAYSADLFNALNDLNNLVIQRDGLSKLEYHEKYHIIENVFKQKKKPTLKQIANEINVNPEDIKGYRITKSGKPQFTEFKLYHDLKSVLFDQSILENEDVLDQIAEILTIYQDKDSIKSKLTELDILLNEEDKENIAQLTGYTGTHRLSLKCIRLVLEEQWYSSRNQMEIFTHLNIKPKKINLTAANKIPKAMIDEFILSPVVKRTFGQAINLINKIIEKYGVPEDIIIELARENNSKDKQKFINEMQKKNENTRKRINEIIGKYGNQNAKRLVEKIRLHDEQEGKCLYSLESIPLEDLLNNPNHYEVDHIIPRSVSFDNSYHNKVLVKQSEASKKSNLTPYQYFNSGKSKLSYNQFKQHILNLSKSQDRISKKKKEYLLEERDINKFEVQKEFINRNLVDTRYATRELTNYLKAYFSANNMNVKVKTINGSFTDYLRKVWKFKKERNHGYKHHAEDALIIANADFLFKENKKLKAVNSVLEKPEIESKQLDIQVDSEDNYSEMFIIPKQVQDIKDFRNFKYSHRVDKKPNRQLINDTLYSTRKKDNSTYIVQTIKDIYAKDNTTLKKQFDKSPEKFLMYQHDPRTFEKLEVIMKQYANEKNPLAKYHEETGEYLTKYSKKNNGPIVKSLKYIGNKLGSHLDVTHQFKSSTKKLVKLSIKPYRFDVYLTDKGYKFITISYLDVLKKDNYYYIPEQKYDKLKLGKAIDKNAKFIASFYKNDLIKLDGEIYKIIGVNSDTRNMIELDLPDIRYKEYCELNNIKGEPRIKKTIGKKVNSIEKLTTDVLGNVFTNTQYTKPQLLFKRGN

SEQ ID NO: 681 - protein, 1053 aa, Staphylococcus aureus
MKRNYILGLDIGITSVGYGIIDYETRDVIDAGVRLFKEANVENNEGRRSKRGARRLKRRRRHRIQRVKKLLFDYNLLTDHSELSGINPYEARVKGLSQKLSEEEFSAALLHLAKRRGVHNVNEVEEDTGNELSTKEQISRNSKALEEKYVAELQLERLKKDGEVRGSINRFKTSDYVKEAKQLLKVQKAYHQLDQSFIDTYIDLLETRRTYYEGPGEGSPFGWKDIKEWYEMLMGHCTYFPEELRSVKYAYNADLYNALNDLNNLVITRDENEKLEYYEKFQIIENVFKQKKKPTLKQIAKEILVNEEDIKGYRVTSTGKPEFTNLKVYHDIKDITARKEIIENAELLDQIAKILTIYQSSEDIQEELTNLNSELTQEEIEQISNLKGYTGTHNLSLKAINLILDELWHTNDNQIAIFNRLKLVPKKVDLSQQKEIPTTLVDDFILSPVVKRSFIQSIKVINAIIKKYGLPNDIIIELAREKNSKDAQKMINEMQKRNRQTNERIEEIIRTTGKENAKYLIEKIKLHDMQEGKCLYSLEAIPLEDLLNNPFNYEVDHIIPRSVSFDNSFNNKVLVKQEENSKKGNRTPFQYLSSSDSKISYETFKKHILNLAKGKGRISKTKKEYLLEERDINRFSVQKDFINRNLVDTRYATRGLMNLLRSYFRVNNLDVKVKSINGGFTSFLRRKWKFKKERNKGYKHHAEDALIIANADFIFKEWKKLDKAKKVMENQMFEEKQAESMPEIETEQEYKEIFITPHQIKHIKDFKDYKYSHRVDKKPNRELINDTLYSTRKDDKGNTLIVNNLNGLYDKDNDKLKKLINKSPEKLLMYHHDPQTYQKLKLIMEQYGDEKNPLYKYYEETGNYLTKYSKKDNGPVIKKIKYYGNKLNAHLDITDDYPNSRNKVVKLSLKPYRFDVYLDNGVYKFVTVKNLDVIKKENYYEVNSKCYEEAKKLKKISNQAEFIASFYNNDLIKINGELYRVIGVNNDLLNRIEVNMIDITYREYLENMNDKRPPRIIKTIASKTQSIKKYSTDILGNLYEVKSKKHPQIIKKG

SEQ ID NO: 682 - protein, 1053 aa, synthetic construct
  REGION 1..1053: note = Synthetic
MKRNYILGLDIGITSVGYGIIDYETRDVIDAGVRLFKEANVENNEGRRSKRGARRLKRRRRHRIQRVKKLLFDYNLLTDHSELSGINPYEARVKGLSQKLSEEEFSAALLHLAKRRGVHNVNEVEEDTGNELSTKEQISRNSKALEEKYVAELQLERLKKDGEVRGSINRFKTSDYVKEAKQLLKVQKAYHQLDQSFIDTYIDLLETRRTYYEGPGEGSPFGWKDIKEWYEMLMGHCTYFPEELRSVKYAYNADLYNALNDLNNLVITRDENEKLEYYEKFQIIENVFKQKKKPTLKQIAKEILVNEEDIKGYRVTSTGKPEFTNLKVYHDIKDITARKEIIENAELLDQIAKILTIYQSSEDIQEELTNLNSELTQEEIEQISNLKGYTGTHNLSLKAINLILDELWHTNDNQIAIFNRLKLVPKKVDLSQQKEIPTTLVDDFILSPVVKRSFIQSIKVINAIIKKYGLPNDIIIELAREKNSKDAQKMINEMQKRNRQTNERIEEIIRTTGKENAKYLIEKIKLHDMQEGKCLYSLEAIPLEDLLNNPFNYEVDHIIPRSVSFDNSFNNKVLVKQEEASKKGNRTPFQYLSSSDSKISYETFKKHILNLAKGKGRISKTKKEYLLEERDINRFSVQKDFINRNLVDTRYATRGLMNLLRSYFRVNNLDVKVKSINGGFTSFLRRKWKFKKERNKGYKHHAEDALIIANADFIFKEWKKLDKAKKVMENQMFEEKQAESMPEIETEQEYKEIFITPHQIKHIKDFKDYKYSHRVDKKPNRELINDTLYSTRKDDKGNTLIVNNLNGLYDKDNDKLKKLINKSPEKLLMYHHDPQTYQKLKLIMEQYGDEKNPLYKYYEETGNYLTKYSKKDNGPVIKKIKYYGNKLNAHLDITDDYPNSRNKVVKLSLKPYRFDVYLDNGVYKFVTVKNLDVIKKENYYEVNSKCYEEAKKLKKISNQAEFIASFYNNDLIKINGELYRVIGVNNDLLNRIEVNMIDITYREYLENMNDKRPPRIIKTIASKTQSIKKYSTDILGNLYEVKSKKHPQIIKKG

SEQ ID NO: 683 - protein, 1052 aa, synthetic construct
  REGION 1..1052: note = Synthetic
KRNYILGLDIGITSVGYGIIDYETRDVIDAGVRLFKEANVENNEGRRSKRGARRLKRRRRHRIQRVKKLLFDYNLLTDHSELSGINPYEARVKGLSQKLSEEEFSAALLHLAKRRGVHNVNEVEEDTGNELSTKEQISRNSKALEEKYVAELQLERLKKDGEVRGSINRFKTSDYVKEAKQLLKVQKAYHQLDQSFIDTYIDLLETRRTYYEGPGEGSPFGWKDIKEWYEMLMGHCTYFPEELRSVKYAYNADLYNALNDLNNLVITRDENEKLEYYEKFQIIENVFKQKKKPTLKQIAKEILVNEEDIKGYRVTSTGKPEFTNLKVYHDIKDITARKEIIENAELLDQIAKILTIYQSSEDIQEELTNLNSELTQEEIEQISNLKGYTGTHNLSLKAINLILDELWHTNDNQIAIFNRLKLVPKKVDLSQQKEIPTTLVDDFILSPVVKRSFIQSIKVINAIIKKYGLPNDIIIELAREKNSKDAQKMINEMQKRNRQTNERIEEIIRTTGKENAKYLIEKIKLHDMQEGKCLYSLEAIPLEDLLNNPFNYEVDHIIPRSVSFDNSFNNKVLVKQEEASKKGNRTPFQYLSSSDSKISYETFKKHILNLAKGKGRISKTKKEYLLEERDINRFSVQKDFINRNLVDTRYATRGLMNLLRSYFRVNNLDVKVKSINGGFTSFLRRKWKFKKERNKGYKHHAEDALIIANADFIFKEWKKLDKAKKVMENQMFEEKQAESMPEIETEQEYKEIFITPHQIKHIKDFKDYKYSHRVDKKPNRELINDTLYSTRKDDKGNTLIVNNLNGLYDKDNDKLKKLINKSPEKLLMYHHDPQTYQKLKLIMEQYGDEKNPLYKYYEETGNYLTKYSKKDNGPVIKKIKYYGNKLNAHLDITDDYPNSRNKVVKLSLKPYRFDVYLDNGVYKFVTVKNLDVIKKENYYEVNSKCYEEAKKLKKISNQAEFIASFYNNDLIKINGELYRVIGVNNDLLNRIEVNMIDITYREYLENMNDKRPPRIIKTIASKTQSIKKYSTDILGNLYEVKSKKHPQIIKKG

SEQ ID NO: 684 - protein, 1368 aa, synthetic construct
  REGION 1..1368: note = Synthetic
MDKKYSIGLDIGTNSVGWAVITDEYKVPSKKFKVLGNTDRHSIKKNLIGALLFDSGETAEATRLKRTARRRYTRRKNRICYLQEIFSNEMAKVDDSFFHRLEESFLVEEDKKHERHPIFGNIVDEVAYHEKYPTIYHLRKKLVDSTDKADLRLIYLALAHMIKFRGHFLIEGDLNPDNSDVDKLFIQLVQTYNQLFEENPINASGVDAKAILSARLSKSRRLENLIAQLPGEKKNGLFGNLIALSLGLTPNFKSNFDLAEDAKLQLSKDTYDDDLDNLLAQIGDQYADLFLAAKNLSDAILLSDILRVNTEITKAPLSASMIKRYDEHHQDLTLLKALVRQQLPEKYKEIFFDQSKNGYAGYIDGGASQEEFYKFIKPILEKMDGTEELLVKLNREDLLRKQRTFDNGSIPHQIHLGELHAILRRQEDFYPFLKDNREKIEKILTFRIPYYVGPLARGNSRFAWMTRKSEETITPWNFEEVVDKGASAQSFIERMTNFDKNLPNEKVLPKHSLLYEYFTVYNELTKVKYVTEGMRKPAFLSGEQKKAIVDLLFKTNRKVTVKQLKEDYFKKIECFDSVEISGVEDRFNASLGTYHDLLKIIKDKDFLDNEENEDILEDIVLTLTLFEDREMIEERLKTYAHLFDDKVMKQLKRRRYTGWGRLSRKLINGIRDKQSGKTILDFLKSDGFANRNFMQLIHDDSLTFKEDIQKAQVSGQGDSLHEHIANLAGSPAIKKGILQTVKVVDELVKVMGRHKPENIVIEMARENQTTQKGQKNSRERMKRIEEGIKELGSQILKEHPVENTQLQNEKLYLYYLQNGRDMYVDQELDINRLSDYDVDHIVPQSFLKDDSIDNKVLTRSDKNRGKSDNVPSEEVVKKMKNYWRQLLNAKLITQRKFDNLTKAERGGLSELDKAGFIKRQLVETRQITKHVAQILDSRMNTKYDENDKLIREVKVITLKSKLVSDFRKDFQFYKVREINNYHHAHDAYLNAVVGTALIKKYPKLESEFVYGDYKVYDVRKMIAKSEQEIGKATAKYFFYSNIMNFFKTEITLANGEIRKRPLIETNGETGEIVWDKGRDFATVRKVLSMPQVNIVKKTEVQTGGFSKESIRPKRNSDKLIARKKDWDPKKYGGFVSPTVAYSVLVVAKVEKGKSKKLKSVKELLGITIMERSSFEKNPIDFLEAKGYKEVKKDLIIKLPKYSLFELENGRKRMLASARFLQKGNELALPSKYVNFLYLASHYEKLKGSPEDNEQKQLFVEQHKHYLDEIIEQISEFSKRVILADANLDKVLSAYNKHRDKPIREQAENIIHLFTLTNLGAPRAFKYFDTTIDRKVYRSTKEVLDATLIHQSITGLYETRIDLSQLGGD

SEQ ID NO: 685 - protein, 1368 aa, synthetic construct
  REGION 1..1368: note = Synthetic
MDKKYSIGLDIGTNSVGWAVITDEYKVPSKKFKVLGNTDRHSIKKNLIGALLFDSGETAEATRLKRTARRRYTRRKNRICYLQEIFSNEMAKVDDSFFHRLEESFLVEEDKKHERHPIFGNIVDEVAYHEKYPTIYHLRKKLVDSTDKADLRLIYLALAHMIKFRGHFLIEGDLNPDNSDVDKLFIQLVQTYNQLFEENPINASGVDAKAILSARLSKSRRLENLIAQLPGEKKNGLFGNLIALSLGLTPNFKSNFDLAEDAKLQLSKDTYDDDLDNLLAQIGDQYADLFLAAKNLSDAILLSDILRVNTEITKAPLSASMIKRYDEHHQDLTLLKALVRQQLPEKYKEIFFDQSKNGYAGYIDGGASQEEFYKFIKPILEKMDGTEELLVKLNREDLLRKQRTFDNGSIPHQIHLGELHAILRRQEDFYPFLKDNREKIEKILTFRIPYYVGPLARGNSRFAWMTRKSEETITPWNFEEVVDKGASAQSFIERMTNFDKNLPNEKVLPKHSLLYEYFTVYNELTKVKYVTEGMRKPAFLSGEQKKAIVDLLFKTNRKVTVKQLKEDYFKKIECFDSVEISGVEDRFNASLGTYHDLLKIIKDKDFLDNEENEDILEDIVLTLTLFEDREMIEERLKTYAHLFDDKVMKQLKRRRYTGWGRLSRKLINGIRDKQSGKTILDFLKSDGFANRNFMQLIHDDSLTFKEDIQKAQVSGQGDSLHEHIANLAGSPAIKKGILQTVKVVDELVKVMGRHKPENIVIEMARENQTTQKGQKNSRERMKRIEEGIKELGSQILKEHPVENTQLQNEKLYLYYLQNGRDMYVDQELDINRLSDYDVDAIVPQSFLKDDSIDNKVLTRSDKNRGKSDNVPSEEVVKKMKNYWRQLLNAKLITQRKFDNLTKAERGGLSELDKAGFIKRQLVETRQITKHVAQILDSRMNTKYDENDKLIREVKVITLKSKLVSDFRKDFQFYKVREINNYHHAHDAYLNAVVGTALIKKYPKLESEFVYGDYKVYDVRKMIAKSEQEIGKATAKYFFYSNIMNFFKTEITLANGEIRKRPLIETNGETGEIVWDKGRDFATVRKVLSMPQVNIVKKTEVQTGGFSKESIRPKRNSDKLIARKKDWDPKKYGGFVSPTVAYSVLVVAKVEKGKSKKLKSVKELLGITIMERSSFEKNPIDFLEAKGYKEVKKDLIIKLPKYSLFELENGRKRMLASARFLQKGNELALPSKYVNFLYLASHYEKLKGSPEDNEQKQLFVEQHKHYLDEIIEQISEFSKRVILADANLDKVLSAYNKHRDKPIREQAENIIHLFTLTNLGAPRAFKYFDTTIDRKVYRSTKEVLDATLIHQSITGLYETRIDLSQLGGD

SEQ ID NO: 686 - protein, 1367 aa, synthetic construct
  REGION 1..1367: note = Synthetic
DKKYSIGLDIGTNSVGWAVITDEYKVPSKKFKVLGNTDRHSIKKNLIGALLFDSGETAEATRLKRTARRRYTRRKNRICYLQEIFSNEMAKVDDSFFHRLEESFLVEEDKKHERHPIFGNIVDEVAYHEKYPTIYHLRKKLVDSTDKADLRLIYLALAHMIKFRGHFLIEGDLNPDNSDVDKLFIQLVQTYNQLFEENPINASGVDAKAILSARLSKSRRLENLIAQLPGEKKNGLFGNLIALSLGLTPNFKSNFDLAEDAKLQLSKDTYDDDLDNLLAQIGDQYADLFLAAKNLSDAILLSDILRVNTEITKAPLSASMIKRYDEHHQDLTLLKALVRQQLPEKYKEIFFDQSKNGYAGYIDGGASQEEFYKFIKPILEKMDGTEELLVKLNREDLLRKQRTFDNGSIPHQIHLGELHAILRRQEDFYPFLKDNREKIEKILTFRIPYYVGPLARGNSRFAWMTRKSEETITPWNFEEVVDKGASAQSFIERMTNFDKNLPNEKVLPKHSLLYEYFTVYNELTKVKYVTEGMRKPAFLSGEQKKAIVDLLFKTNRKVTVKQLKEDYFKKIECFDSVEISGVEDRFNASLGTYHDLLKIIKDKDFLDNEENEDILEDIVLTLTLFEDREMIEERLKTYAHLFDDKVMKQLKRRRYTGWGRLSRKLINGIRDKQSGKTILDFLKSDGFANRNFMQLIHDDSLTFKEDIQKAQVSGQGDSLHEHIANLAGSPAIKKGILQTVKVVDELVKVMGRHKPENIVIEMARENQTTQKGQKNSRERMKRIEEGIKELGSQILKEHPVENTQLQNEKLYLYYLQNGRDMYVDQELDINRLSDYDVDAIVPQSFLKDDSIDNKVLTRSDKNRGKSDNVPSEEVVKKMKNYWRQLLNAKLITQRKFDNLTKAERGGLSELDKAGFIKRQLVETRQITKHVAQILDSRMNTKYDENDKLIREVKVITLKSKLVSDFRKDFQFYKVREINNYHHAHDAYLNAVVGTALIKKYPKLESEFVYGDYKVYDVRKMIAKSEQEIGKATAKYFFYSNIMNFFKTEITLANGEIRKRPLIETNGETGEIVWDKGRDFATVRKVLSMPQVNIVKKTEVQTGGFSKESIRPKRNSDKLIARKKDWDPKKYGGFVSPTVAYSVLVVAKVEKGKSKKLKSVKELLGITIMERSSFEKNPIDFLEAKGYKEVKKDLIIKLPKYSLFELENGRKRMLASARFLQKGNELALPSKYVNFLYLASHYEKLKGSPEDNEQKQLFVEQHKHYLDEIIEQISEFSKRVILADANLDKVLSAYNKHRDKPIREQAENIIHLFTLTNLGAPRAFKYFDTTIDRKVYRSTKEVLDATLIHQSITGLYETRIDLSQLGGD

SEQ ID NO: 687 - protein, 1368 aa, synthetic construct
  REGION 1..1368: note = Synthetic
MDKKYSIGLDIGTNSVGWAVITDEYKVPSKKFKVLGNTDRHSIKKNLIGALLFDSGETAEATRLKRTARRRYTRRKNRICYLQEIFSNEMAKVDDSFFHRLEESFLVEEDKKHERHPIFGNIVDEVAYHEKYPTIYHLRKKLVDSTDKADLRLIYLALAHMIKFRGHFLIEGDLNPDNSDVDKLFIQLVQTYNQLFEENPINASGVDAKAILSARLSKSRRLENLIAQLPGEKKNGLFGNLIALSLGLTPNFKSNFDLAEDAKLQLSKDTYDDDLDNLLAQIGDQYADLFLAAKNLSDAILLSDILRVNTEITKAPLSASMIKRYDEHHQDLTLLKALVRQQLPEKYKEIFFDQSKNGYAGYIDGGASQEEFYKFIKPILEKMDGTEELLVKLNREDLLRKQRTFDNGSIPHQIHLGELHAILRRQEDFYPFLKDNREKIEKILTFRIPYYVGPLARGNSRFAWMTRKSEETITPWNFEEVVDKGASAQSFIERMTNFDKNLPNEKVLPKHSLLYEYFTVYNELTKVKYVTEGMRKPAFLSGEQKKAIVDLLFKTNRKVTVKQLKEDYFKKIECFDSVEISGVEDRFNASLGTYHDLLKIIKDKDFLDNEENEDILEDIVLTLTLFEDREMIEERLKTYAHLFDDKVMKQLKRRRYTGWGRLSRKLINGIRDKQSGKTILDFLKSDGFANRNFMQLIHDDSLTFKEDIQKAQVSGQGDSLHEHIANLAGSPAIKKGILQTVKVVDELVKVMGRHKPENIVIEMARENQTTQKGQKNSRERMKRIEEGIKELGSQILKEHPVENTQLQNEKLYLYYLQNGRDMYVDQELDINRLSDYDVDHIVPQSFLKDDSIDNKVLTRSDKNRGKSDNVPSEEVVKKMKNYWRQLLNAKLITQRKFDNLTKAERGGLSELDKAGFIKRQLVETRQITKHVAQILDSRMNTKYDENDKLIREVKVITLKSKLVSDFRKDFQFYKVREINNYHHAHDAYLNAVVGTALIKKYPKLESEFVYGDYKVYDVRKMIAKSEQEIGKATAKYFFYSNIMNFFKTEITLANGEIRKRPLIETNGETGEIVWDKGRDFATVRKVLSMPQVNIVKKTEVQTGGFSKESILPKRNSDKLIARKKDWDPKKYGGFVSPTVAYSVLVVAKVEKGKSKKLKSVKELLGITIMERSSFEKNPIDFLEAKGYKEVKKDLIIKLPKYSLFELENGRKRMLASARELQKGNELALPSKYVNFLYLASHYEKLKGSPEDNEQKQLFVEQHKHYLDEIIEQISEFSKRVILADANLDKVLSAYNKHRDKPIREQAENIIHLFTLTNLGAPAAFKYFDTTIDRKQYRSTKEVLDATLIHQSITGLYETRIDLSQLGGD

SEQ ID NO: 688 - protein, 1368 aa, synthetic construct
  REGION 1..1368: note = Synthetic
MDKKYSIGLDIGTNSVGWAVITDEYKVPSKKFKVLGNTDRHSIKKNLIGALLFDSGETAEATRLKRTARRRYTRRKNRICYLQEIFSNEMAKVDDSFFHRLEESFLVEEDKKHERHPIFGNIVDEVAYHEKYPTIYHLRKKLVDSTDKADLRLIYLALAHMIKFRGHFLIEGDLNPDNSDVDKLFIQLVQTYNQLFEENPINASGVDAKAILSARLSKSRRLENLIAQLPGEKKNGLFGNLIALSLGLTPNFKSNFDLAEDAKLQLSKDTYDDDLDNLLAQIGDQYADLFLAAKNLSDAILLSDILRVNTEITKAPLSASMIKRYDEHHQDLTLLKALVRQQLPEKYKEIFFDQSKNGYAGYIDGGASQEEFYKFIKPILEKMDGTEELLVKLNREDLLRKQRTFDNGSIPHQIHLGELHAILRRQEDFYPFLKDNREKIEKILTFRIPYYVGPLARGNSRFAWMTRKSEETITPWNFEEVVDKGASAQSFIERMTNFDKNLPNEKVLPKHSLLYEYFTVYNELTKVKYVTEGMRKPAFLSGEQKKAIVDLLFKTNRKVTVKQLKEDYFKKIECFDSVEISGVEDRFNASLGTYHDLLKIIKDKDFLDNEENEDILEDIVLTLTLFEDREMIEERLKTYAHLFDDKVMKQLKRRRYTGWGRLSRKLINGIRDKQSGKTILDFLKSDGFANRNFMQLIHDDSLTFKEDIQKAQVSGQGDSLHEHIANLAGSPAIKKGILQTVKVVDELVKVMGRHKPENIVIEMARENQTTQKGQKNSRERMKRIEEGIKELGSQILKEHPVENTQLQNEKLYLYYLQNGRDMYVDQELDINRLSDYDVDAIVPQSFLKDDSIDNKVLTRSDKNRGKSDNVPSEEVVKKMKNYWRQLLNAKLITQRKFDNLTKAERGGLSELDKAGFIKRQLVETRQITKHVAQILDSRMNTKYDENDKLIREVKVITLKSKLVSDFRKDFQFYKVREINNYHHAHDAYLNAVVGTALIKKYPKLESEFVYGDYKVYDVRKMIAKSEQEIGKATAKYFFYSNIMNFFKTEITLANGEIRKRPLIETNGETGEIVWDKGRDFATVRKVLSMPQVNIVKKTEVQTGGFSKESILPKRNSDKLIARKKDWDPKKYGGFVSPTVAYSVLVVAKVEKGKSKKLKSVKELLGITIMERSSFEKNPIDFLEAKGYKEVKKDLIIKLPKYSLFELENGRKRMLASARELQKGNELALPSKYVNFLYLASHYEKLKGSPEDNEQKQLFVEQHKHYLDEIIEQISEFSKRVILADANLDKVLSAYNKHRDKPIREQAENIIHLFTLTNLGAPAAFKYFDTTIDRKQYRSTKEVLDATLIHQSITGLYETRIDLSQLGGD

SEQ ID NO: 689 - protein, 1367 aa, synthetic construct
  REGION 1..1367: note = Synthetic
DKKYSIGLDIGTNSVGWAVITDEYKVPSKKFKVLGNTDRHSIKKNLIGALLFDSGETAEATRLKRTARRRYTRRKNRICYLQEIFSNEMAKVDDSFFHRLEESFLVEEDKKHERHPIFGNIVDEVAYHEKYPTIYHLRKKLVDSTDKADLRLIYLALAHMIKFRGHFLIEGDLNPDNSDVDKLFIQLVQTYNQLFEENPINASGVDAKAILSARLSKSRRLENLIAQLPGEKKNGLFGNLIALSLGLTPNFKSNFDLAEDAKLQLSKDTYDDDLDNLLAQIGDQYADLFLAAKNLSDAILLSDILRVNTEITKAPLSASMIKRYDEHHQDLTLLKALVRQQLPEKYKEIFFDQSKNGYAGYIDGGASQEEFYKFIKPILEKMDGTEELLVKLNREDLLRKQRTFDNGSIPHQIHLGELHAILRRQEDFYPFLKDNREKIEKILTFRIPYYVGPLARGNSRFAWMTRKSEETITPWNFEEVVDKGASAQSFIERMTNFDKNLPNEKVLPKHSLLYEYFTVYNELTKVKYVTEGMRKPAFLSGEQKKAIVDLLFKTNRKVTVKQLKEDYFKKIECFDSVEISGVEDRFNASLGTYHDLLKIIKDKDFLDNEENEDILEDIVLTLTLFEDREMIEERLKTYAHLFDDKVMKQLKRRRYTGWGRLSRKLINGIRDKQSGKTILDFLKSDGFANRNFMQLIHDDSLTFKEDIQKAQVSGQGDSLHEHIANLAGSPAIKKGILQTVKVVDELVKVMGRHKPENIVIEMARENQTTQKGQKNSRERMKRIEEGIKELGSQILKEHPVENTQLQNEKLYLYYLQNGRDMYVDQELDINRLSDYDVDAIVPQSFLKDDSIDNKVLTRSDKNRGKSDNVPSEEVVKKMKNYWRQLLNAKLITQRKFDNLTKAERGGLSELDKAGFIKRQLVETRQITKHVAQILDSRMNTKYDENDKLIREVKVITLKSKLVSDFRKDFQFYKVREINNYHHAHDAYLNAVVGTALIKKYPKLESEFVYGDYKVYDVRKMIAKSEQEIGKATAKYFFYSNIMNFFKTEITLANGEIRKRPLIETNGETGEIVWDKGRDFATVRKVLSMPQVNIVKKTEVQTGGFSKESILPKRNSDKLIARKKDWDPKKYGGFVSPTVAYSVLVVAKVEKGKSKKLKSVKELLGITIMERSSFEKNPIDFLEAKGYKEVKKDLIIKLPKYSLFELENGRKRMLASARELQKGNELALPSKYVNFLYLASHYEKLKGSPEDNEQKQLFVEQHKHYLDEIIEQISEFSKRVILADANLDKVLSAYNKHRDKPIREQAENIIHLFTLTNLGAPAAFKYFDTTIDRKQYRSTKEVLDATLIHQSITGLYETRIDLSQLGGD

SEQ ID NO: 690 - protein, 1368 aa, synthetic construct
  REGION 1..1368: note = Synthetic
MDKKYSIGLDIGTNSVGWAVITDEYKVPSKKFKVLGNTDRHSIKKNLIGALLFDSGETAERTRLKRTARRRYTRRKNRICYLQEIFSNEMAKVDDSFFHRLEESFLVEEDKKHERHPIFGNIVDEVAYHEKYPTIYHLRKKLVDSTDKADLRLIYLALAHMIKFRGHFLIEGDLNPDNSDVDKLFIQLVQTYNQLFEENPINASGVDAKAILSARLSKSRRLENLIAQLPGEKKNGLFGNLIALSLGLTPNFKSNFDLAEDAKLQLSKDTYDDDLDNLLAQIGDQYADLFLAAKNLSDAILLSDILRVNTEITKAPLSASMIKRYDEHHQDLTLLKALVRQQLPEKYKEIFFDQSKNGYAGYIDGGASQEEFYKFIKPILEKMDGTEELLVKLNREDLLRKQRTFDNGSIPHQIHLGELHAILRRQEDFYPFLKDNREKIEKILTFRIPYYVGPLARGNSRFAWMTRKSEETITPWNFEEVVDKGASAQSFIERMTNFDKNLPNEKVLPKHSLLYEYFTVYNELTKVKYVTEGMRKPAFLSGEQKKAIVDLLFKTNRKVTVKQLKEDYFKKIECFDSVEISGVEDRFNASLGTYHDLLKIIKDKDFLDNEENEDILEDIVLTLTLFEDREMIEERLKTYAHLFDDKVMKQLKRRRYTGWGRLSRKLINGIRDKQSGKTILDFLKSDGFANRNFMQLIHDDSLTFKEDIQKAQVSGQGDSLHEHIANLAGSPAIKKGILQTVKVVDELVKVMGRHKPENIVIEMARENQTTQKGQKNSRERMKRIEEGIKELGSQILKEHPVENTQLQNEKLYLYYLQNGRDMYVDQELDINRLSDYDVDHIVPQSFLKDDSIDNKVLTRSDKNRGKSDNVPSEEVVKKMKNYWRQLLNAKLITQRKFDNLTKAERGGLSELDKAGFIKRQLVETRQITKHVAQILDSRMNTKYDENDKLIREVKVITLKSKLVSDFRKDFQFYKVREINNYHHAHDAYLNAVVGTALIKKYPKLESEFVYGDYKVYDVRKMIAKSEQEIGKATAKYFFYSNIMNFFKTEITLANGEIRKRPLIETNGETGEIVWDKGRDFATVRKVLSMPQVNIVKKTEVQTGGFSKESIRPKRNSDKLIARKKDWDPKKYGGFLWPTVAYSVLVVAKVEKGKSKKLKSVKELLGITIMERSSFEKNPIDFLEAKGYKEVKKDLIIKLPKYSLFELENGRKRMLASAKQLQKGNELALPSKYVNFLYLASHYEKLKGSPEDNEQKQLFVEQHKHYLDEIIEQISEFSKRVILADANLDKVLSAYNKHRDKPIREQAENIIHLFTLTRLGAPRAFKYFDTTIDPKQYRSTKEVLDATLIHQSITGLYETRIDLSQLGGD

SEQ ID NO: 691 - protein, 1368 aa, synthetic construct
  REGION 1..1368: note = Synthetic
MDKKYSIGLDIGTNSVGWAVITDEYKVPSKKFKVLGNTDRHSIKKNLIGALLFDSGETAERTRLKRTARRRYTRRKNRICYLQEIFSNEMAKVDDSFFHRLEESFLVEEDKKHERHPIFGNIVDEVAYHEKYPTIYHLRKKLVDSTDKADLRLIYLALAHMIKFRGHFLIEGDLNPDNSDVDKLFIQLVQTYNQLFEENPINASGVDAKAILSARLSKSRRLENLIAQLPGEKKNGLFGNLIALSLGLTPNFKSNFDLAEDAKLQLSKDTYDDDLDNLLAQIGDQYADLFLAAKNLSDAILLSDILRVNTEITKAPLSASMIKRYDEHHQDLTLLKALVRQQLPEKYKEIFFDQSKNGYAGYIDGGASQEEFYKFIKPILEKMDGTEELLVKLNREDLLRKQRTFDNGSIPHQIHLGELHAILRRQEDFYPFLKDNREKIEKILTFRIPYYVGPLARGNSRFAWMTRKSEETITPWNFEEVVDKGASAQSFIERMTNFDKNLPNEKVLPKHSLLYEYFTVYNELTKVKYVTEGMRKPAFLSGEQKKAIVDLLFKTNRKVTVKQLKEDYFKKIECFDSVEISGVEDRFNASLGTYHDLLKIIKDKDFLDNEENEDILEDIVLTLTLFEDREMIEERLKTYAHLFDDKVMKQLKRRRYTGWGRLSRKLINGIRDKQSGKTILDFLKSDGFANRNFMQLIHDDSLTFKEDIQKAQVSGQGDSLHEHIANLAGSPAIKKGILQTVKVVDELVKVMGRHKPENIVIEMARENQTTQKGQKNSRERMKRIEEGIKELGSQILKEHPVENTQLQNEKLYLYYLQNGRDMYVDQELDINRLSDYDVDAIVPQSFLKDDSIDNKVLTRSDKNRGKSDNVPSEEVVKKMKNYWRQLLNAKLITQRKFDNLTKAERGGLSELDKAGFIKRQLVETRQITKHVAQILDSRMNTKYDENDKLIREVKVITLKSKLVSDFRKDFQFYKVREINNYHHAHDAYLNAVVGTALIKKYPKLESEFVYGDYKVYDVRKMIAKSEQEIGKATAKYFFYSNIMNFFKTEITLANGEIRKRPLIETNGETGEIVWDKGRDFATVRKVLSMPQVNIVKKTEVQTGGFSKESIRPKRNSDKLIARKKDWDPKKYGGFLWPTVAYSVLVVAKVEKGKSKKLKSVKELLGITIMERSSFEKNPIDFLEAKGYKEVKKDLIIKLPKYSLFELENGRKRMLASAKQLQKGNELALPSKYVNFLYLASHYEKLKGSPEDNEQKQLFVEQHKHYLDEIIEQISEFSKRVILADANLDKVLSAYNKHRDKPIREQAENIIHLFTLTRLGAPRAFKYFDTTIDPKQYRSTKEVLDATLIHQSITGLYETRIDLSQLGGD

SEQ ID NO: 692 - protein, 1367 aa, synthetic construct
  REGION 1..1367: note = Synthetic
DKKYSIGLDIGTNSVGWAVITDEYKVPSKKFKVLGNTDRHSIKKNLIGALLFDSGETAERTRLKRTARRRYTRRKNRICYLQEIFSNEMAKVDDSFFHRLEESFLVEEDKKHERHPIFGNIVDEVAYHEKYPTIYHLRKKLVDSTDKADLRLIYLALAHMIKFRGHFLIEGDLNPDNSDVDKLFIQLVQTYNQLFEENPINASGVDAKAILSARLSKSRRLENLIAQLPGEKKNGLFGNLIALSLGLTPNFKSNFDLAEDAKLQLSKDTYDDDLDNLLAQIGDQYADLFLAAKNLSDAILLSDILRVNTEITKAPLSASMIKRYDEHHQDLTLLKALVRQQLPEKYKEIFFDQSKNGYAGYIDGGASQEEFYKFIKPILEKMDGTEELLVKLNREDLLRKQRTFDNGSIPHQIHLGELHAILRRQEDFYPFLKDNREKIEKILTFRIPYYVGPLARGNSRFAWMTRKSEETITPWNFEEVVDKGASAQSFIERMTNFDKNLPNEKVLPKHSLLYEYFTVYNELTKVKYVTEGMRKPAFLSGEQKKAIVDLLFKTNRKVTVKQLKEDYFKKIECFDSVEISGVEDRFNASLGTYHDLLKIIKDKDFLDNEENEDILEDIVLTLTLFEDREMIEERLKTYAHLFDDKVMKQLKRRRYTGWGRLSRKLINGIRDKQSGKTILDFLKSDGFANRNFMQLIHDDSLTFKEDIQKAQVSGQGDSLHEHIANLAGSPAIKKGILQTVKVVDELVKVMGRHKPENIVIEMARENQTTQKGQKNSRERMKRIEEGIKELGSQILKEHPVENTQLQNEKLYLYYLQNGRDMYVDQELDINRLSDYDVDAIVPQSFLKDDSIDNKVLTRSDKNRGKSDNVPSEEVVKKMKNYWRQLLNAKLITQRKFDNLTKAERGGLSELDKAGFIKRQLVETRQITKHVAQILDSRMNTKYDENDKLIREVKVITLKSKLVSDFRKDFQFYKVREINNYHHAHDAYLNAVVGTALIKKYPKLESEFVYGDYKVYDVRKMIAKSEQEIGKATAKYFFYSNIMNFFKTEITLANGEIRKRPLIETNGETGEIVWDKGRDFATVRKVLSMPQVNIVKKTEVQTGGFSKESIRPKRNSDKLIARKKDWDPKKYGGFLWPTVAYSVLVVAKVEKGKSKKLKSVKELLGITIMERSSFEKNPIDFLEAKGYKEVKKDLIIKLPKYSLFELENGRKRMLASAKQLQKGNELALPSKYVNFLYLASHYEKLKGSPEDNEQKQLFVEQHKHYLDEIIEQISEFSKRVILADANLDKVLSAYNKHRDKPIREQAENIIHLFTLTRLGAPRAFKYFDTTIDPKQYRSTKEVLDATLIHQSITGLYETRIDLSQLGGD

SEQ ID NO: 693 - protein, 1057 aa, synthetic construct
  REGION 1..1057: note = Synthetic
MNQKFILGLDIGITSVGYGLIDYETKNIIDAGVRLFPEANVENNEGRRSKRGSRRLKRRRIHRLERVKLLLTEYDLINKEQIPTSNNPYQIRVKGLSEILSKDELAIALLHLAKRRGIHNVDVAADKEETASDSLSTKDQINKNAKFLESRYVCELQKERLENEGHVRGVENRFLTKDIVREAKKIIDTQMQYYPEIDETFKEKYISLVETRREYFEGPGQGSPFGWNGDLKKWYEMLMGHCTYFPQELRSVKYAYSADLFNALNDLNNLIIQRDNSEKLEYHEKYHIIENVFKQKKKPTLKQIAKEIGVNPEDIKGYRITKSGTPEFTSFKLFHDLKKVVKDHAILDDIDLLNQIAEILTIYQDKDSIVAELGQLEYLMSEADKQSISELTGYTGTHSLSLKCMNMIIDELWHSSMNQMEVFTYLNMRPKKYELKGYQRIPTDMIDDAILSPVVKRTFIQSINVINKVIEKYGIPEDIIIELARENNSDDRKKFINNLQKKNEATRKRINEIIGQTGNQNAKRIVEKIRLHDQQEGKCLYSLESIPLEDLLNNPNHYEVDHIIPRSVSFDNSYHNKVLVKQSENSKKSNLTPYQYFNSGKSKLSYNQFKQHILNLSKSQDRISKKKKEYLLEERDINKFEVQKEFINRNLVDTRYATRELTNYLKAYFSANNMNVKVKTINGSFTDYLRKVWKFKKERNHGYKHHAEDALIIANADFLFKENKKLKAVNSVLEKPEIETKQLDIQVDSEDNYSEMFIIPKQVQDIKDFRNFKYSHRVDKKPNRQLINDTLYSTRKKDNSTYIVQTIKDIYAKDNTTLKKQFDKSPEKFLMYQHDPRTFEKLEVIMKQYANEKNPLAKYHEETGEYLTKYSKKNNGPIVKSLKYIGNKLGSHLDVTHQFKSSTKKLVKLSIKNYRFDVYLTEKGYKFVTIAYLNVFKKDNYYYIPKDKYQELKEKKKIKDTDQFIASFYKNDLIKLNGDLYKIIGVNSDDRNIIELDYYDIKYKDYCEINNIKGEPRIKKTIGKKTESIEKFTTDVLGNLYLHSTEKAPQLIFKRGL

SEQ ID NO: 694 - protein, 1057 aa, synthetic construct
  REGION 1..1057: note = Synthetic
MNQKFILGLDIGITSVGYGLIDYETKNIIDAGVRLFPEANVENNEGRRSKRGSRRLKRRRIHRLERVKLLLTEYDLINKEQIPTSNNPYQIRVKGLSEILSKDELAIALLHLAKRRGIHNVDVAADKEETASDSLSTKDQINKNAKFLESRYVCELQKERLENEGHVRGVENRFLTKDIVREAKKIIDTQMQYYPEIDETFKEKYISLVETRREYFEGPGQGSPFGWNGDLKKWYEMLMGHCTYFPQELRSVKYAYSADLFNALNDLNNLIIQRDNSEKLEYHEKYHIIENVFKQKKKPTLKQIAKEIGVNPEDIKGYRITKSGTPEFTSFKLFHDLKKVVKDHAILDDIDLLNQIAEILTIYQDKDSIVAELGQLEYLMSEADKQSISELTGYTGTHSLSLKCMNMIIDELWHSSMNQMEVFTYLNMRPKKYELKGYQRIPTDMIDDAILSPVVKRTFIQSINVINKVIEKYGIPEDIIIELARENNSDDRKKFINNLQKKNEATRKRINEIIGQTGNQNAKRIVEKIRLHDQQEGKCLYSLESIPLEDLLNNPNHYEVDHIIPRSVSFDNSYHNKVLVKQSEASKKSNLTPYQYFNSGKSKLSYNQFKQHILNLSKSQDRISKKKKEYLLEERDINKFEVQKEFINRNLVDTRYATRELTNYLKAYFSANNMNVKVKTINGSFTDYLRKVWKFKKERNHGYKHHAEDALIIANADFLFKENKKLKAVNSVLEKPEIETKQLDIQVDSEDNYSEMFIIPKQVQDIKDFRNFKYSHRVDKKPNRQLINDTLYSTRKKDNSTYIVQTIKDIYAKDNTTLKKQFDKSPEKFLMYQHDPRTFEKLEVIMKQYANEKNPLAKYHEETGEYLTKYSKKNNGPIVKSLKYIGNKLGSHLDVTHQFKSSTKKLVKLSIKNYRFDVYLTEKGYKFVTIAYLNVFKKDNYYYIPKDKYQELKEKKKIKDTDQFIASFYKNDLIKLNGDLYKIIGVNSDDRNIIELDYYDIKYKDYCEINNIKGEPRIKKTIGKKTESIEKFTTDVLGNLYLHSTEKAPQLIFKRGL

SEQ ID NO: 695 - protein, 1056 aa, synthetic construct
  REGION 1..1056: note = Synthetic
NQKFILGLDIGITSVGYGLIDYETKNIIDAGVRLFPEANVENNEGRRSKRGSRRLKRRRIHRLERVKLLLTEYDLINKEQIPTSNNPYQIRVKGLSEILSKDELAIALLHLAKRRGIHNVDVAADKEETASDSLSTKDQINKNAKFLESRYVCELQKERLENEGHVRGVENRFLTKDIVREAKKIIDTQMQYYPEIDETFKEKYISLVETRREYFEGPGQGSPFGWNGDLKKWYEMLMGHCTYFPQELRSVKYAYSADLFNALNDLNNLIIQRDNSEKLEYHEKYHIIENVFKQKKKPTLKQIAKEIGVNPEDIKGYRITKSGTPEFTSFKLFHDLKKVVKDHAILDDIDLLNQIAEILTIYQDKDSIVAELGQLEYLMSEADKQSISELTGYTGTHSLSLKCMNMIIDELWHSSMNQMEVFTYLNMRPKKYELKGYQRIPTDMIDDAILSPVVKRTFIQSINVINKVIEKYGIPEDIIIELARENNSDDRKKFINNLQKKNEATRKRINEIIGQTGNQNAKRIVEKIRLHDQQEGKCLYSLESIPLEDLLNNPNHYEVDHIIPRSVSFDNSYHNKVLVKQSEASKKSNLTPYQYFNSGKSKLSYNQFKQHILNLSKSQDRISKKKKEYLLEERDINKFEVQKEFINRNLVDTRYATRELTNYLKAYFSANNMNVKVKTINGSFTDYLRKVWKFKKERNHGYKHHAEDALIIANADFLFKENKKLKAVNSVLEKPEIETKQLDIQVDSEDNYSEMFIIPKQVQDIKDFRNFKYSHRVDKKPNRQLINDTLYSTRKKDNSTYIVQTIKDIYAKDNTTLKKQFDKSPEKFLMYQHDPRTFEKLEVIMKQYANEKNPLAKYHEETGEYLTKYSKKNNGPIVKSLKYIGNKLGSHLDVTHQFKSSTKKLVKLSIKNYRFDVYLTEKGYKFVTIAYLNVFKKDNYYYIPKDKYQELKEKKKIKDTDQFIASFYKNDLIKLNGDLYKIIGVNSDDRNIIELDYYDIKYKDYCEINNIKGEPRIKKTIGKKTESIEKFTTDVLGNLYLHSTEKAPQLIFKRGL

SEQ ID NO: 696 - protein, 1057 aa, synthetic construct
  REGION 1..1057: note = Synthetic
MNQKFILGLDIGITSVGYGLIDYETKNIIDAGVRLFPEANVENNEGRRSKRGSRRLKRRRIHRLERVKLLLTEYDLINKEQIPTSNNPYQIRVKGLSEILSKDELAIALLHLAKRRGIHNVDVAADKEETASDSLSTKDQINKNAKFLESRYVCELQKERLENEGHVRGVENRFLTKDIVREAKKIIDTQMQYYPEIDETFKEKYISLVETRREYFEGPGQGSPFGWNGDLKKWYEMLMGHCTYFPQELRSVKYAYSADLFNALNDLNNLIIQRDNSEKLEYHEKYHIIENVFKQKKKPTLKQIAKEIGVNPEDIKGYRITKSGTPEFTSFKLFHDLKKVVKDHAILDDIDLLNQIAEILTIYQDKDSIVAELGQLEYLMSEADKQSISELTGYTGTHSLSLKCMNMIIDELWHSSMNQMEVFTYLNMRPKKYELKGYQRIPTDMIDDAILSPVVKRTFIQSINVINKVIEKYGIPEDIIIELARENNSDDRKKFINNLQKKNEATRKRINEIIGQTGNQNAKRIVEKIRLHDQQEGKCLYSLESIPLEDLLNNPNHYEVDHIIPRSVSFDNSYHNKVLVKQSENSKKSNLTPYQYFNSGKSKLSYNQFKQHILNLSKSQDRISKKKKEYLLEERDINKFEVQKEFINRNLVDTRYATRELTSYLKAYFSANNMDVKVKTINGSFTNHLRKVWRFDKYRNHGYKHHAEDALIIANADFLFKENKKLQNTNKILEKPTIENNTKKVTVEKEEDYNNVFETPKLVEDIKQYRDYKFSHRVDKKPNRQLINDTLYSTRMKDEHDYIVQTITDIYGKDNTNLKKQFNKNPEKFLMYQNDPKTFEKLSIIMKQYSDEKNPLAKYYEETGEYLTKYSKKNNGPIVKKIKLLGNKVGNHLDVTNKYENSTKKLVKLSIKNYRFDVYLTEKGYKFVTIAYLNVFKKDNYYYIPKDKYQELKEKKKIKDTDQFIASFYKNDLIKLNGDLYKIIGVNSDDRNIIELDYYDIKYKDYCEINNIKGEPRIKKTIGKKTESIEKFTTDVLGNLYLHSTEKAPQLIFKRGL

SEQ ID NO: 697 - protein, 1057 aa, synthetic construct
  REGION 1..1057: note = Synthetic
MNQKFILGLDIGITSVGYGLIDYETKNIIDAGVRLFPEANVENNEGRRSKRGSRRLKRRRIHRLERVKLLLTEYDLINKEQIPTSNNPYQIRVKGLSEILSKDELAIALLHLAKRRGIHNVDVAADKEETASDSLSTKDQINKNAKFLESRYVCELQKERLENEGHVRGVENRFLTKDIVREAKKIIDTQMQYYPEIDETFKEKYISLVETRREYFEGPGQGSPFGWNGDLKKWYEMLMGHCTYFPQELRSVKYAYSADLFNALNDLNNLIIQRDNSEKLEYHEKYHIIENVFKQKKKPTLKQIAKEIGVNPEDIKGYRITKSGTPEFTSFKLFHDLKKVVKDHAILDDIDLLNQIAEILTIYQDKDSIVAELGQLEYLMSEADKQSISELTGYTGTHSLSLKCMNMIIDELWHSSMNQMEVFTYLNMRPKKYELKGYQRIPTDMIDDAILSPVVKRTFIQSINVINKVIEKYGIPEDIIIELARENNSDDRKKFINNLQKKNEATRKRINEIIGQTGNQNAKRIVEKIRLHDQQEGKCLYSLESIPLEDLLNNPNHYEVDHIIPRSVSFDNSYHNKVLVKQSEASKKSNLTPYQYFNSGKSKLSYNQFKQHILNLSKSQDRISKKKKEYLLEERDINKFEVQKEFINRNLVDTRYATRELTSYLKAYFSANNMDVKVKTINGSFTNHLRKVWRFDKYRNHGYKHHAEDALIIANADFLFKENKKLQNTNKILEKPTIENNTKKVTVEKEEDYNNVFETPKLVEDIKQYRDYKFSHRVDKKPNRQLINDTLYSTRMKDEHDYIVQTITDIYGKDNTNLKKQFNKNPEKFLMYQNDPKTFEKLSIIMKQYSDEKNPLAKYYEETGEYLTKYSKKNNGPIVKKIKLLGNKVGNHLDVTNKYENSTKKLVKLSIKNYRFDVYLTEKGYKFVTIAYLNVFKKDNYYYIPKDKYQELKEKKKIKDTDQFIASFYKNDLIKLNGDLYKIIGVNSDDRNIIELDYYDIKYKDYCEINNIKGEPRIKKTIGKKTESIEKFTTDVLGNLYLHSTEKAPQLIFKRGL

SEQ ID NO: 698 - protein, 1056 aa, synthetic construct
  REGION 1..1056: note = Synthetic
NQKFILGLDIGITSVGYGLIDYETKNIIDAGVRLFPEANVENNEGRRSKRGSRRLKRRRIHRLERVKLLLTEYDLINKEQIPTSNNPYQIRVKGLSEILSKDELAIALLHLAKRRGIHNVDVAADKEETASDSLSTKDQINKNAKFLESRYVCELQKERLENEGHVRGVENRFLTKDIVREAKKIIDTQMQYYPEIDETFKEKYISLVETRREYFEGPGQGSPFGWNGDLKKWYEMLMGHCTYFPQELRSVKYAYSADLFNALNDLNNLIIQRDNSEKLEYHEKYHIIENVFKQKKKPTLKQIAKEIGVNPEDIKGYRITKSGTPEFTSFKLFHDLKKVVKDHAILDDIDLLNQIAEILTIYQDKDSIVAELGQLEYLMSEADKQSISELTGYTGTHSLSLKCMNMIIDELWHSSMNQMEVFTYLNMRPKKYELKGYQRIPTDMIDDAILSPVVKRTFIQSINVINKVIEKYGIPEDIIIELARENNSDDRKKFINNLQKKNEATRKRINEIIGQTGNQNAKRIVEKIRLHDQQEGKCLYSLESIPLEDLLNNPNHYEVDHIIPRSVSFDNSYHNKVLVKQSEASKKSNLTPYQYFNSGKSKLSYNQFKQHILNLSKSQDRISKKKKEYLLEERDINKFEVQKEFINRNLVDTRYATRELTSYLKAYFSANNMDVKVKTINGSFTNHLRKVWRFDKYRNHGYKHHAEDALIIANADFLFKENKKLQNTNKILEKPTIENNTKKVTVEKEEDYNNVFETPKLVEDIKQYRDYKFSHRVDKKPNRQLINDTLYSTRMKDEHDYIVQTITDIYGKDNTNLKKQFNKNPEKFLMYQNDPKTFEKLSIIMKQYSDEKNPLAKYYEETGEYLTKYSKKNNGPIVKKIKLLGNKVGNHLDVTNKYENSTKKLVKLSIKNYRFDVYLTEKGYKFVTIAYLNVFKKDNYYYIPKDKYQELKEKKKIKDTDQFIASFYKNDLIKLNGDLYKIIGVNSDDRNIIELDYYDIKYKDYCEINNIKGEPRIKKTIGKKTESIEKFTTDVLGNLYLHSTEKAPQLIFKRGL

SEQ ID NO: 699 - protein, 1368 aa, synthetic construct
  REGION 1..1368: note = Synthetic
MDKKYSIGLDIGTNSVGWAVITDEYKVPSKKFKVLGNTDRHSIKKNLIGALLFDSGETAEATRLKRTARRRYTRRKNRICYLQEIFSNEMAKVDDSFFHRLEESFLVEEDKKHERHPIFGNIVDEVAYHEKYPTIYHLRKKLVDSTDKADLRLIYLALAHMIKFRGHFLIEGDLNPDNSDVDKLFIQLVQTYNQLFEENPINASGVDAKAILSARLSKSRRLENLIAQLPGEKKNGLFGNLIALSLGLTPNFKSNFDLAEDAKLQLSKDTYDDDLDNLLAQIGDQYADLFLAAKNLSDAILLSDILRVNTEITKAPLSASMIKRYDEHHQDLTLLKALVRQQLPEKYKEIFFDQSKNGYAGYIDGGASQEEFYKFIKPILEKMDGTEELLVKLNREDLLRKQRTFDNGSIPHQIHLGELHAILRRQEDFYPFLKDNREKIEKILTFRIPYYVGPLARGNSRFAWMTRKSEETITPWNFEEVVDKGASAQSFIERMTNFDKNLPNEKVLPKHSLLYEYFTVYNELTKVKYVTEGMRKPAFLSGEQKKAIVDLLFKTNRKVTVKQLKEDYFKKIECFDSVEISGVEDRFNASLGTYHDLLKIIKDKDFLDNEENEDILEDIVLTLTLFEDREMIEERLKTYAHLFDDKVMKQLKRRRYTGWGRLSRKLINGIRDKQSGKTILDFLKSDGFANRNFMQLIHDDSLTFKEDIQKAQVSGQGDSLHEHIANLAGSPAIKKGILQTVKVVDELVKVMGRHKPENIVIEMARENQTTQKGQKNSRERMKRIEEGIKELGSQILKEHPVENTQLQNEKLYLYYLQNGRDMYVDQELDINRLSDYDVDHIVPQSFLKDDSIDNKVLTRSDKNRGKSDNVPSEEVVKKMKNYWRQLLNAKLITQRKFDNLTKAERGGLSELDKAGFIKRQLVETRQITKHVAQILDSRMNTKYDENDKLIREVKVITLKSKLVSDFRKDFQFYKVREINNYHHAHDAYLNAVVGTALIKKYPKLESEFVYGDYKVYDVRKMIAKSEQEIGKATAKYFFYSNIMNFFKTEITLANGEIRKRPLIETNGETGEIVWDKGRDFATVRKVLSMPQVNIVKKTEVQTGGFSKESILPKRNSDKLIARKKDWDPKKYGGFLWPTVAYSVLVVAKVEKGKSKKLKSVKELLGITIMERSSFEKNPIDFLEAKGYKEVKKDLIIKLPKYSLFELENGRKRMLASAKQLQKGNELALPSKYVNFLYLASHYEKLKGSPEDNEQKQLFVEQHKHYLDEIIEQISEFSKRVILADANLDKVLSAYNKHRDKPIREQAENIIHLFTLTNLGAPAAFKYFDTTIDRKQYRSTKEVLDATLIHQSITGLYETRIDLSQLGGD

SEQ ID NO: 700 - protein, 1368 aa, synthetic construct
  REGION 1..1368: note = Synthetic
MDKKYSIGLDIGTNSVGWAVITDEYKVPSKKFKVLGNTDRHSIKKNLIGALLFDSGETAEATRLKRTARRRYTRRKNRICYLQEIFSNEMAKVDDSFFHRLEESFLVEEDKKHERHPIFGNIVDEVAYHEKYPTIYHLRKKLVDSTDKADLRLIYLALAHMIKFRGHFLIEGDLNPDNSDVDKLFIQLVQTYNQLFEENPINASGVDAKAILSARLSKSRRLENLIAQLPGEKKNGLFGNLIALSLGLTPNFKSNFDLAEDAKLQLSKDTYDDDLDNLLAQIGDQYADLFLAAKNLSDAILLSDILRVNTEITKAPLSASMIKRYDEHHQDLTLLKALVRQQLPEKYKEIFFDQSKNGYAGYIDGGASQEEFYKFIKPILEKMDGTEELLVKLNREDLLRKQRTFDNGSIPHQIHLGELHAILRRQEDFYPFLKDNREKIEKILTFRIPYYVGPLARGNSRFAWMTRKSEETITPWNFEEVVDKGASAQSFIERMTNFDKNLPNEKVLPKHSLLYEYFTVYNELTKVKYVTEGMRKPAFLSGEQKKAIVDLLFKTNRKVTVKQLKEDYFKKIECFDSVEISGVEDRFNASLGTYHDLLKIIKDKDFLDNEENEDILEDIVLTLTLFEDREMIEERLKTYAHLFDDKVMKQLKRRRYTGWGRLSRKLINGIRDKQSGKTILDFLKSDGFANRNFMQLIHDDSLTFKEDIQKAQVSGQGDSLHEHIANLAGSPAIKKGILQTVKVVDELVKVMGRHKPENIVIEMARENQTTQKGQKNSRERMKRIEEGIKELGSQILKEHPVENTQLQNEKLYLYYLQNGRDMYVDQELDINRLSDYDVDAIVPQSFLKDDSIDNKVLTRSDKNRGKSDNVPSEEVVKKMKNYWRQLLNAKLITQRKFDNLTKAERGGLSELDKAGFIKRQLVETRQITKHVAQILDSRMNTKYDENDKLIREVKVITLKSKLVSDFRKDFQFYKVREINNYHHAHDAYLNAVVGTALIKKYPKLESEFVYGDYKVYDVRKMIAKSEQEIGKATAKYFFYSNIMNFFKTEITLANGEIRKRPLIETNGETGEIVWDKGRDFATVRKVLSMPQVNIVKKTEVQTGGFSKESILPKRNSDKLIARKKDWDPKKYGGFLWPTVAYSVLVVAKVEKGKSKKLKSVKELLGITIMERSSFEKNPIDFLEAKGYKEVKKDLIIKLPKYSLFELENGRKRMLASAKQLQKGNELALPSKYVNFLYLASHYEKLKGSPEDNEQKQLFVEQHKHYLDEIIEQISEFSKRVILADANLDKVLSAYNKHRDKPIREQAENIIHLFTLTNLGAPAAFKYFDTTIDRKQYRSTKEVLDATLIHQSITGLYETRIDLSQLGGD

SEQ ID NO: 701 - protein, 1367 aa, synthetic construct
  REGION 1..1367: note = Synthetic
DKKYSIGLDIGTNSVGWAVITDEYKVPSKKFKVLGNTDRHSIKKNLIGALLFDSGETAEATRLKRTARRRYTRRKNRICYLQEIFSNEMAKVDDSFFHRLEESFLVEEDKKHERHPIFGNIVDEVAYHEKYPTIYHLRKKLVDSTDKADLRLIYLALAHMIKFRGHFLIEGDLNPDNSDVDKLFIQLVQTYNQLFEENPINASGVDAKAILSARLSKSRRLENLIAQLPGEKKNGLFGNLIALSLGLTPNFKSNFDLAEDAKLQLSKDTYDDDLDNLLAQIGDQYADLFLAAKNLSDAILLSDILRVNTEITKAPLSASMIKRYDEHHQDLTLLKALVRQQLPEKYKEIFFDQSKNGYAGYIDGGASQEEFYKFIKPILEKMDGTEELLVKLNREDLLRKQRTFDNGSIPHQIHLGELHAILRRQEDFYPFLKDNREKIEKILTFRIPYYVGPLARGNSRFAWMTRKSEETITPWNFEEVVDKGASAQSFIERMTNFDKNLPNEKVLPKHSLLYEYFTVYNELTKVKYVTEGMRKPAFLSGEQKKAIVDLLFKTNRKVTVKQLKEDYFKKIECFDSVEISGVEDRFNASLGTYHDLLKIIKDKDFLDNEENEDILEDIVLTLTLFEDREMIEERLKTYAHLFDDKVMKQLKRRRYTGWGRLSRKLINGIRDKQSGKTILDFLKSDGFANRNFMQLIHDDSLTFKEDIQKAQVSGQGDSLHEHIANLAGSPAIKKGILQTVKVVDELVKVMGRHKPENIVIEMARENQTTQKGQKNSRERMKRIEEGIKELGSQILKEHPVENTQLQNEKLYLYYLQNGRDMYVDQELDINRLSDYDVDAIVPQSFLKDDSIDNKVLTRSDKNRGKSDNVPSEEVVKKMKNYWRQLLNAKLITQRKFDNLTKAERGGLSELDKAGFIKRQLVETRQITKHVAQILDSRMNTKYDENDKLIREVKVITLKSKLVSDFRKDFQFYKVREINNYHHAHDAYLNAVVGTALIKKYPKLESEFVYGDYKVYDVRKMIAKSEQEIGKATAKYFFYSNIMNFFKTEITLANGEIRKRPLIETNGETGEIVWDKGRDFATVRKVLSMPQVNIVKKTEVQTGGFSKESILPKRNSDKLIARKKDWDPKKYGGFLWPTVAYSVLVVAKVEKGKSKKLKSVKELLGITIMERSSFEKNPIDFLEAKGYKEVKKDLIIKLPKYSLFELENGRKRMLASAKQLQKGNELALPSKYVNFLYLASHYEKLKGSPEDNEQKQLFVEQHKHYLDEIIEQISEFSKRVILADANLDKVLSAYNKHRDKPIREQAENIIHLFTLTNLGAPAAFKYFDTTIDRKQYRSTKEVLDATLIHQSITGLYETRIDLSQLGGD

SEQ ID NO: 702 - protein, 30 aa, synthetic construct
  REGION 1..30: note = Synthetic
MDSLLMNRRKFLYQFKNVRWAKGRRETYLC

SEQ ID NO: 703 - protein, 18 aa, synthetic construct
  REGION 1..18: note = Synthetic
KRTADGSEFESPKKKRKV

SEQ ID NO: 704 - protein, 17 aa, synthetic construct
  REGION 1..17: note = Synthetic
KRTADGSEFEPKKKRKV

SEQ ID NO: 705 - protein, 19 aa, synthetic construct
  REGION 1..19: note = Synthetic
NLSKRPAAIKKAGQAKKKK

SEQ ID NO: 706 - protein, 11 aa, synthetic construct
  REGION 1..11: note = Synthetic
RQRRNELKRSF

SEQ ID NO: 707 - protein, 38 aa, synthetic construct
  REGION 1..38: note = Synthetic
NQSSNFGPMKGGNFGGRSSGPYGGGGQYFAKPRNQGGY

SEQ ID NO: 708 - protein, 7 aa, synthetic construct
  REGION 1..7: note = Synthetic
PKKKRKV

SEQ ID NO: 709 - protein, 16 aa, synthetic construct
  REGION 1..16: note = Synthetic
  VARIANT 3..12: note = Xaa can be any naturally occurring amino acid
KRXXXXXXXXXXKKKL

SEQ ID NO: 710 - protein, 16 aa, synthetic construct
  REGION 1..16: note = Synthetic
KRPAATKKAGQAKKKK

SEQ ID NO: 711 - protein, 19 aa, synthetic construct
  REGION 1..19: note = Synthetic
MKRTADGSEFESPKKKRKV

SEQ ID NO: 712 - protein, 20 aa, synthetic construct
  REGION 1..20: note = Synthetic
AVKRPAATKKAGQAKKKKLD

SEQ ID NO: 713 - protein, 25 aa, synthetic construct
  REGION 1..25: note = Synthetic
MSRRRKANPTKLSENAKKLAKEVEN

SEQ ID NO: 714 - protein, 9 aa, synthetic construct
  REGION 1..9: note = Synthetic
PAAKRVKLD

SEQ ID NO: 715 - protein, 9 aa, synthetic construct
  REGION 1..9: note = Synthetic
KLKIKRPVK

SEQ ID NO: 716 - protein, 8 aa, synthetic construct
  REGION 1..8: note = Synthetic
VSRKRPRP

SEQ ID NO: 717 - protein, 10 aa, synthetic construct
  REGION 1..10: note = Synthetic
EGAPPAKRAR

SEQ ID NO: 718 - protein, 16 aa, synthetic construct
  REGION 1..16: note = Synthetic
RQARRNRRRRWRERNR

SEQ ID NO: 719 - protein, 12 aa, synthetic construct
  REGION 1..12: note = Synthetic
PPQPKKKPLDGE

SEQ ID NO: 720 - protein, 21 aa, synthetic construct
  REGION 1..21: note = Synthetic
SGGSKRTADGSEFEPKKKRKV

SEQ ID NO: 721 - DNA, 33 bp, synthetic construct
  misc_feature 1..33: note = Synthetic
  source 1..33: mol_type = other DNA
gccaacatgaggatcacccatgtctgcagggcc

SEQ ID NO: 722 - protein, 131 aa, synthetic construct
  REGION 1..131: note = Synthetic
GSASNFTQFVLVDNGGTGDVTVAPSNFANGVAEWISSNSRSQAYKVTCSVRQSSAQNRKYTIKVEVPKVATQTVGGEELPVAGWRSYLNMELTIPIFATNSDCELIVKAMQGLLKDGNPIPSAIAANSGIY

SEQ ID NO: 723 - protein, 150 aa, synthetic construct
  REGION 1..150: note = Synthetic
  REPEAT 1..150: note = "GGGGS" repeats 1 - 30 times
GGGGSGGGGSGGGGSGGGGSGGGGSGGGGSGGGGSGGGGSGGGGSGGGGSGGGGSGGGGSGGGGSGGGGSGGGGSGGGGSGGGGSGGGGSGGGGSGGGGSGGGGSGGGGSGGGGSGGGGSGGGGSGGGGSGGGGSGGGGSGGGGSGGGGS

SEQ ID NO: 724 - protein, 30 aa, synthetic construct
  REGION 1..30: note = Synthetic
  REPEAT 1..30: note = G repeats 1- 30 times
GGGGGGGGGGGGGGGGGGGGGGGGGGGGGG

SEQ ID NO: 725 - protein, 150 aa, synthetic construct
  REGION 1..150: note = Synthetic
  REPEAT 1..150: note = "EAAAK" repeats 1 - 30 times
EAAAKEAAAKEAAAKEAAAKEAAAKEAAAKEAAAKEAAAKEAAAKEAAAKEAAAKEAAAKEAAAKEAAAKEAAAKEAAAKEAAAKEAAAKEAAAKEAAAKEAAAKEAAAKEAAAKEAAAKEAAAKEAAAKEAAAKEAAAKEAAAKEAAAK

SEQ ID NO: 726 - protein, 90 aa, synthetic construct
  REGION 1..90: note = Synthetic
  REPEAT 1..90: note = "GGS" repeats 1 - 30 times
GGSGGSGGSGGSGGSGGSGGSGGSGGSGGSGGSGGSGGSGGSGGSGGSGGSGGSGGSGGSGGSGGSGGSGGSGGSGGSGGSGGSGGSGGS

SEQ ID NO: 727 - protein, 120 aa, synthetic construct
  REGION 1..120: note = Synthetic
  REPEAT 1..120: note = "SGGS" repeats 1 - 30 times
SGGSSGGSSGGSSGGSSGGSSGGSSGGSSGGSSGGSSGGSSGGSSGGSSGGSSGGSSGGSSGGSSGGSSGGSSGGSSGGSSGGSSGGSSGGSSGGSSGGSSGGSSGGSSGGSSGGSSGGS

SEQ ID NO: 728 - protein, 60 aa, synthetic construct
  REGION 1..60: note = Synthetic
  REPEAT 1..60: note = "XP" repeats 1 - 30 times
XPXPXPXPXPXPXPXPXPXPXPXPXPXPXPXPXPXPXPXPXPXPXPXPXPXPXPXPXPXP

SEQ ID NO: 729 - protein, 16 aa, synthetic construct
  REGION 1..16: note = Synthetic
SGSETPGTSESATPES

SEQ ID NO: 730 - protein, 32 aa, synthetic construct
  REGION 1..32: note = Synthetic
SGGSSGGSSGSETPGTSESATPESSGGSSGGS

SEQ ID NO: 731 - protein, 10 aa, synthetic construct
  REGION 1..10: note = Synthetic
SGGSGGSGGS

SEQ ID NO: 732 - protein, 4 aa, synthetic construct
  REGION 1..4: note = Synthetic
SGGS

SEQ ID NO: 733 - protein, 60 aa, synthetic construct
  REGION 1..60: note = Synthetic
SGGSSGGSSGSETPGTSESATPESAGSYPYDVPDYAGSAAPAAKKKKLDGSGSGGSSGGS

SEQ ID NO: 734 - protein, 6 aa, synthetic construct
  REGION 1..6: note = Synthetic
GGSGGS

SEQ ID NO: 735 - protein, 9 aa, synthetic construct
  REGION 1..9: note = Synthetic
GGSGGSGGS

SEQ ID NO: 736 - protein, 33 aa, synthetic construct
  REGION 1..33: note = Synthetic
SGGSSGGSSGSETPGTSESATPESSGGSSGGSS

SEQ ID NO: 737 - protein, 34 aa, synthetic construct
  REGION 1..34: note = Synthetic
SGGSSGGSKRTADGSEFESPKKKRKVSGGSSGGS

SEQ ID NO: 738 - protein, 22 aa, synthetic construct
  REGION 1..22: note = Synthetic
SGGSKRTADGSEFESPKKKRKV

SEQ ID NO: 739 - protein, 12 aa, synthetic construct
  REGION 1..12: note = Synthetic
GSGPAAKRVKLD

SEQ ID NO: 740 - protein, 2117 aa, synthetic construct
  REGION 1..2117: note = Synthetic
MKRTADGSEFESPKKKRKVDKKYSIGLDIGTNSVGWAVITDEYKVPSKKFKVLGNTDRHSIKKNLIGALLFDSGETAEATRLKRTARRRYTRRKNRICYLQEIFSNEMAKVDDSFFHRLEESFLVEEDKKHERHPIFGNIVDEVAYHEKYPTIYHLRKKLVDSTDKADLRLIYLALAHMIKFRGHFLIEGDLNPDNSDVDKLFIQLVQTYNQLFEENPINASGVDAKAILSARLSKSRRLENLIAQLPGEKKNGLFGNLIALSLGLTPNFKSNFDLAEDAKLQLSKDTYDDDLDNLLAQIGDQYADLFLAAKNLSDAILLSDILRVNTEITKAPLSASMIKRYDEHHQDLTLLKALVRQQLPEKYKEIFFDQSKNGYAGYIDGGASQEEFYKFIKPILEKMDGTEELLVKLNREDLLRKQRTFDNGSIPHQIHLGELHAILRRQEDFYPFLKDNREKIEKILTFRIPYYVGPLARGNSRFAWMTRKSEETITPWNFEEVVDKGASAQSFIERMTNFDKNLPNEKVLPKHSLLYEYFTVYNELTKVKYVTEGMRKPAFLSGEQKKAIVDLLFKTNRKVTVKQLKEDYFKKIECFDSVEISGVEDRFNASLGTYHDLLKIIKDKDFLDNEENEDILEDIVLTLTLFEDREMIEERLKTYAHLFDDKVMKQLKRRRYTGWGRLSRKLINGIRDKQSGKTILDFLKSDGFANRNFMQLIHDDSLTFKEDIQKAQVSGQGDSLHEHIANLAGSPAIKKGILQTVKVVDELVKVMGRHKPENIVIEMARENQTTQKGQKNSRERMKRIEEGIKELGSQILKEHPVENTQLQNEKLYLYYLQNGRDMYVDQELDINRLSDYDVDAIVPQSFLKDDSIDNKVLTRSDKNRGKSDNVPSEEVVKKMKNYWRQLLNAKLITQRKFDNLTKAERGGLSELDKAGFIKRQLVETRQITKHVAQILDSRMNTKYDENDKLIREVKVITLKSKLVSDFRKDFQFYKVREINNYHHAHDAYLNAVVGTALIKKYPKLESEFVYGDYKVYDVRKMIAKSEQEIGKATAKYFFYSNIMNFFKTEITLANGEIRKRPLIETNGETGEIVWDKGRDFATVRKVLSMPQVNIVKKTEVQTGGFSKESILPKRNSDKLIARKKDWDPKKYGGFDSPTVAYSVLVVAKVEKGKSKKLKSVKELLGITIMERSSFEKNPIDFLEAKGYKEVKKDLIIKLPKYSLFELENGRKRMLASAGELQKGNELALPSKYVNFLYLASHYEKLKGSPEDNEQKQLFVEQHKHYLDEIIEQISEFSKRVILADANLDKVLSAYNKHRDKPIREQAENIIHLFTLTNLGAPAAFKYFDTTIDRKRYTSTKEVLDATLIHQSITGLYETRIDLSQLGGDSGGSSGGSSGSETPGTSESATPESSGGSSGGSSTLNIEDEYRLHETSKEPDVSLGSTWLSDFPQAWAETGGMGLAVRQAPLIIPLKATSTPVSIKQYPMSQEARLGIKPHIQRLLDQGILVPCQSPWNTPLLPVKKPGTNDYRPVQDLREVNKRVEDIHPTVPNPYNLLSGLPPSHQWYTVLDLKDAFFCLRLHPTSQPLFAFEWRDPEMGISGQLTWTRLPQGFKNSPTLFNEALHRDLADFRIQHPDLILLQYVDDLLLAATSELDCQQGTRALLQTLGNLGYRASAKKAQICQKQVKYLGYLLKEGQRWLTEARKETVMGQPTPKTPRQLREFLGKAGFCRLFIPGFAEMAAPLYPLTKPGTLFNWGPDQQKAYQEIKQALLTAPALGLPDLTKPFELFVDEKQGYAKGVLTQKLGPWRRPVAYLSKKLDPVAAGWPPCLRMVAAIAVLTKDAGKLTMGQPLVILAPHAVEALVKQPPDRWLSNARMTHYQALLLDTDRVQFGPVVALNPATLLPLPEEGLQHNCLDILAEAHGTRPDLTDQPLPDADHTWYTDGSSLLQEGQRKAGAAVTTETEVIWAKALPAGTSAQRAELIALTQALKMAEGKKLNVYTDSRYAFATAHIHGEIYRRRGWLTSEGKEIKNKDEILALLKALFLPKRLSIIHCPGHQKGHSAEARGNRMADQAARKAAITETPDTSTLLIENSSPSGGSKRTADGSEFEPKKKRKV

SEQ ID NO: 741 - protein, 2131 aa, synthetic construct
  REGION 1..2131: note = Synthetic
MKRTADGSEFESPKKKRKVDKKYSIGLDIGTNSVGWAVITDEYKVPSKKFKVLGNTDRHSIKKNLIGALLFDSGETAEATRLKRTARRRYTRRKNRICYLQEIFSNEMAKVDDSFFHRLEESFLVEEDKKHERHPIFGNIVDEVAYHEKYPTIYHLRKKLVDSTDKADLRLIYLALAHMIKFRGHFLIEGDLNPDNSDVDKLFIQLVQTYNQLFEENPINASGVDAKAILSARLSKSRKLENLIAQLPGEKKNGLFGNLIALSLGLTPNFKSNFDLAEDAKLQLSKDTYDDDLDNLLAQIGDQYADLFLAAKNLSDAILLSDILRVNTEITKAPLSASMIKRYDEHHQDLTLLKALVRQQLPEKYKEIFFDQSKNGYAGYIDGGASQEEFYKFIKPILEKMDGTEELLVKLKREDLLRKQRTFDNGSIPHQIHLGELHAILRRQEDFYPFLKDNREKIEKILTFRIPYYVGPLARGNSRFAWMTRKSEETITPWNFEEVVDKGASAQSFIERMTNFDKNLPNEKVLPKHSLLYEYFTVYNELTKVKYVTEGMRKPAFLSGEQKKAIVDLLFKTNRKVTVKQLKEDYFKKIECFDSVEISGVEDRFNASLGTYHDLLKIIKDKDFLDNEENEDILEDIVLTLTLFEDREMIEERLKTYAHLFDDKVMKQLKRRRYTGWGRLSRKLINGIRDKQSGKTILDFLKSDGFANRNFMQLIHDDSLTFKEDIQKAQVSGQGDSLHEHIANLAGSPAIKKGILQTVKVVDELVKVMGRHKPENIVIEMARENQTTQKGQKNSRERMKRIEEGIKELGSQILKEHPVENTQLQNEKLYLYYLQNGRDMYVDQELDINRLSDYDVDAIVPQSFLKDDSIDNKVLTRSDKNRGKSDNVPSEEVVKKMKNYWRQLLNAKLITQRKFDNLTKAERGGLSELDKAGFIKRQLVETRQITKHVAQILDSRMNTKYDENDKLIREVKVITLKSKLVSDFRKDFQFYKVREINNYHHAHDAYLNAVVGTALIKKYPKLESEFVYGDYKVYDVRKMIAKSEQEIGKATAKYFFYSNIMNFFKTEITLANGEIRKRPLIETNGETGEIVWDKGRDFATVRKVLSMPQVNIVKKTEVQTGGFSKESILPKRNSDKLIARKKDWDPKKYGGFDSPTVAYSVLVVAKVEKGKSKKLKSVKELLGITIMERSSFEKNPIDFLEAKGYKEVKKDLIIKLPKYSLFELENGRKRMLASAGELQKGNELALPSKYVNFLYLASHYEKLKGSPEDNEQKQLFVEQHKHYLDEIIEQISEFSKRVILADANLDKVLSAYNKHRDKPIREQAENIIHLFTLTNLGAPAAFKYFDTTIDRKRYTSTKEVLDATLIHQSITGLYETRIDLSQLGGDSGGSSGGSKRTADGSEFESPKKKRKVSGGSSGGSTLNIEDEYRLHETSKEPDVSLGSTWLSDFPQAWAETGGMGLAVRQAPLIIPLKATSTPVSIKQYPMSQEARLGIKPHIQRLLDQGILVPCQSPWNTPLLPVKKPGTNDYRPVQDLREVNKRVEDIHPTVPNPYNLLSGLPPSHQWYTVLDLKDAFFCLRLHPTSQPLFAFEWRDPEMGISGQLTWTRLPQGFKNSPTLFNEALHRDLADFRIQHPDLILLQYVDDLLLAATSELDCQQGTRALLQTLGNLGYRASAKKAQICQKQVKYLGYLLKEGQRWLTEARKETVMGQPTPKTPRQLREFLGKAGFCRLFIPGFAEMAAPLYPLTKPGTLFNWGPDQQKAYQEIKQALLTAPALGLPDLTKPFELFVDEKQGYAKGVLTQKLGPWRRPVAYLSKKLDPVAAGWPPCLRMVAAIAVLTKDAGKLTMGQPLVILAPHAVEALVKQPPDRWLSNARMTHYQALLLDTDRVQFGPVVALNPATLLPLPEEGLQHNCLDILAEAHGTRPDLTDQPLPDADHTWYTDGSSLLQEGQRKAGAAVTTETEVIWAKALPAGTSAQRAELIALTQALKMAEGKKLNVYTDSRYAFATAHIHGEIYRRRGWLTSEGKEIKNKDEILALLKALFLPKRLSIIHCPGHQKGHSAEARGNRMADQAARKAAITETPDTSTLLIENSSPSGGSKRTADGSEFESPKKKRKVGSGPAAKRVKLD

SEQ ID NO: 742 - protein, 119 aa, synthetic construct
  REGION 1..119: note = Synthetic
MSRSVALAVLALLSLSGLEAIQRTPKIQVYSRHPAENGKSNFLNCYVSGFHPSDIEVDLLKNGERIEKVEHSDLSFSKDWSFYLLYYTEFTPTEKDEYACRVNHVTLSQPKIVKWDRDM

SEQ ID NO: 743 - DNA, 943 bp, synthetic construct
  misc_feature 1..943: note = Synthetic
  source 1..943: mol_type = other DNA
attcctgaagctgacagcattcgggccgagatgtctcgctccgtggccttagctgtgctcgcgctactctctctttctggcctggaggctatccagcgtactccaaagattcaggtttactcacgtcatccagcagagaatggaaagtcaaatttcctgaattgctatgtgtctgggtttcatccatccgacattgaagttgacttactgaagaatggagagagaattgaaaaagtggagcattcagacttgtctttcagcaaggactggtctttctatctcttgtactacactgaattcacccccactgaaaaagatgagtatgcctgccgtgtgaaccatgtgactttgtcacagcccaagatagttaagtgggatcgagacatgtaagcagcatcatggaggtttgaagatgccgcatttggattggatgaattccaaattctgcttgcttgctttttaatattgatatgcttatacacttacactttatgcacaaaatgtagggttataataatgttaacatggacatgatcttctttataattctactttgagtgctgtctccatgtttgatgtatctgagcaggttgctccacaggtagctctaggagggctggcaacttagaggtggggagcagagaattctcttatccaacatcaacatcttggtcagatttgaactcttcaatctcttgcactcaaagcttgttaagatagttaagcgtgcataagttaacttccaatttacatactctgcttagaatttgggggaaaatttagaaatataattgacaggattattggaaatttgttataatgaatgaaacattttgtcatataagattcatatttacttcttatacatttgataaagtaaggcatggttgtggttaatctggtttatttttgttccacaagttaaataaatcataaaacttga

SEQ ID NO: 744 - skipped

SEQ ID NO: 745 - RNA, 30 nt, synthetic construct
  misc_feature 1..30: note = Synthetic
  source 1..30: mol_type = other RNA
aacattgacgcgtctctacgtgggggcgcg

SEQ ID NO: 746 - RNA, 55 nt, synthetic construct
  misc_feature 1..55: note = Synthetic
  source 1..55: mol_type = other RNA
gggtcaggagccccccccctgaacccaggataaccctcaaagtcggggggcaacc

SEQ ID NO: 747 - RNA, 60 nt, synthetic construct
  misc_feature 1..60: note = Synthetic
  source 1..60: mol_type = other RNA
gtcagggtcaggagccccccccctgaacccaggataaccctcaaagtcggggggcaaccc

SEQ ID NO: 748 - RNA, 56 nt, synthetic construct
  misc_feature 1..56: note = Synthetic
  source 1..56: mol_type = other RNA
gggtcaggagccccccccctgaacccaggaaaaccctcaaagtcggggggcaaccc

SEQ ID NO: 749 - RNA, 56 nt, synthetic construct
  misc_feature 1..56: note = Synthetic
  source 1..56: mol_type = other RNA
gggtcaggagccccccccctgcacccaggaaaaccctcaaagtcggggggcaaccc

SEQ ID NO: 750 - RNA, 56 nt, synthetic construct
  misc_feature 1..56: note = Synthetic
  source 1..56: mol_type = other RNA
gggtcaggagccccccccctgcacccaggataaccctcaaagtcggggggcaaccc

SEQ ID NO: 751 - RNA, 60 nt, synthetic construct
  misc_feature 1..60: note = Synthetic
  source 1..60: mol_type = other RNA
gtcagggtcaggagccccccccctgaacccaggaaaaccctcaaagtcggggggcaaccc

SEQ ID NO: 752 - RNA, 60 nt, synthetic construct
  misc_feature 1..60: note = Synthetic
  source 1..60: mol_type = other RNA
gtcagggtcaggagccccccccctgcacccaggaaaaccctcaaagtcggggggcaaccc

SEQ ID NO: 753 - RNA, 51 nt, synthetic construct
  misc_feature 1..51: note = Synthetic
  source 1..51: mol_type = other RNA
gggtcaggagccccccccctgaacccaggataaccctcaaagtcggggggc

SEQ ID NO: 754 - RNA, 13 nt, synthetic construct
  misc_feature 1..13: note = Synthetic
  source 1..13: mol_type = other RNA
tggtggtggtggt

SEQ ID NO: 755 - RNA, 20 nt, synthetic construct
  misc_feature 1..20: note = Synthetic
  source 1..20: mol_type = other RNA
gggacagggcagggacaggg

SEQ ID NO: 756 - RNA, 21 nt, synthetic construct
  misc_feature 1..21: note = Synthetic
  source 1..21: mol_type = other RNA
gggtccgggtctgggtctggg

SEQ ID NO: 757 - RNA, 19 nt, synthetic construct
  misc_feature 1..19: note = Synthetic
  source 1..19: mol_type = other RNA
gggcagggtctgggctggg

SEQ ID NO: 758 - RNA, 19 nt, synthetic construct
  misc_feature 1..19: note = Synthetic
  source 1..19: mol_type = other RNA
gggctgggatgggaaaggg

SEQ ID NO: 759 - RNA, 19 nt, synthetic construct
  misc_feature 1..19: note = Synthetic
  source 1..19: mol_type = other RNA
gggctctgggtgggccggg

SEQ ID NO: 760 - RNA, 18 nt, synthetic construct
  misc_feature 1..18: note = Synthetic
  source 1..18: mol_type = other RNA
gggctgggctgggcaggg

SEQ ID NO: 761 - RNA, 17 nt, synthetic construct
  misc_feature 1..17: note = Synthetic
  source 1..17: mol_type = other RNA
gggtgggctgggaaggg

SEQ ID NO: 762 - RNA, 17 nt, synthetic construct
  misc_feature 1..17: note = Synthetic
  source 1..17: mol_type = other RNA
gggagggagggctaggg

SEQ ID NO: 763 - RNA, 17 nt, synthetic construct
  misc_feature 1..17: note = Synthetic
  source 1..17: mol_type = other RNA
gggcagggctgggaggg

SEQ ID NO: 764 - RNA, 16 nt, synthetic construct
  misc_feature 1..16: note = Synthetic
  source 1..16: mol_type = other RNA
gggtgggagggctggg

SEQ ID NO: 765 - RNA, 43 nt, synthetic construct
  misc_feature 1..43: note = Synthetic
  source 1..43: mol_type = other RNA
gcgtaacctccatccgagttgcaagagagggaaacgcagtctc

SEQ ID NO: 766 - RNA, 160 nt, synthetic construct
  misc_feature 1..160: note = Synthetic
  source 1..160: mol_type = other RNA
ggaattgcgggaaaggggtcaacagccgttcagtaccaagtctcaggggaaactttgagatggccttgcaaagggtatggtaataagctgacggacatggtcctaaccacgcagccaagtcctaagtcaacagatcttctgttgatatggatgcagttca

SEQ ID NO: 767 - RNA, 42 nt, synthetic construct
  misc_feature 1..42: note = Synthetic
  source 1..42: mol_type = other RNA
ttgacgcggttctatctagttacgcgttaaaccaactagaaa

SEQ ID NO: 768 - RNA, 42 nt, synthetic construct
  misc_feature 1..42: note = Synthetic
  source 1..42: mol_type = other RNA
ttgacgcggttctatctacttacgcgttaaaccaactagaaa

SEQ ID NO: 769 - RNA, 44 nt, synthetic construct
  misc_feature 1..44: note = Synthetic
  source 1..44: mol_type = other RNA
cgcgagtctaggggataacgcgttaaacttcctagaaggcggtt

SEQ ID NO: 770 - RNA, 44 nt, synthetic construct
  misc_feature 1..44: note = Synthetic
  source 1..44: mol_type = other RNA
cgcggatctagattgtaacgcgttaaaccatctagaaggcggtt

SEQ ID NO: 771 - RNA, 44 nt, synthetic construct
  misc_feature 1..44: note = Synthetic
  source 1..44: mol_type = other RNA
cgcgtcgctaccgcccggcgcgttaaacacactagaaggcggtt

SEQ ID NO: 772 - RNA, 37 nt, synthetic construct
  misc_feature 1..37: note = Synthetic
  source 1..37: mol_type = other RNA
cgcggttctatctagttacgcgttaaaccaactagaa

SEQ ID NO: 773 - RNA, 68 nt, synthetic construct
  misc_feature 1..68: note = Synthetic
  source 1..68: mol_type = other RNA
ggccggcatggtcccagcctcctcgctggcgccggctgggcaacatgcttcggcatggcgaatgggac

SEQ ID NO: 774 - RNA, 18 nt, synthetic construct
  misc_feature 1..18: note = Synthetic
  source 1..18: mol_type = other RNA
ggtgggagacgtcccacc

SEQ ID NO: 775 - RNA, 24 nt, synthetic construct
  misc_feature 1..24: note = Synthetic
  source 1..24: mol_type = other RNA
gagcagcatggcgtcgctgctcac

SEQ ID NO: 776 - RNA, 21 nt, synthetic construct
  misc_feature 1..21: note = Synthetic
  source 1..21: mol_type = other RNA
ccatcagttgacaccctgagg

SEQ ID NO: 777 - RNA, 28 nt, synthetic construct
  misc_feature 1..28: note = Synthetic
  source 1..28: mol_type = other RNA
gcagacctaagtggtgacatatggtctg

SEQ ID NO: 778 - RNA, 24 nt, synthetic construct
  misc_feature 1..24: note = Synthetic
  source 1..24: mol_type = other RNA
catgcgattagaaataatcgcatg

SEQ ID NO: 779 - RNA, 118 nt, synthetic construct
  misc_feature 1..118: note = Synthetic
  source 1..118: mol_type = other RNA
tctgccatcaaagctgcgaccgtgctcagtctggtgggagacgtcccaccggccggcatggtcccagcctcctcgctggcgccggctgggcaacatgcttcggcatggcgaatgggac

SEQ ID NO: 780-784 - skipped (5 entries)

SEQ ID NO: 785 - RNA, 75 nt, synthetic construct
  misc_feature 1..75: note = Synthetic
  variation 72..75: note = u may be present or absent
  source 1..75: mol_type = other RNA
ggccggcatggtcccagcctcctcgctggcgccggctgggcaacatgcttcggcatggcgaatgggacttttttt

SEQ ID NO: 786 - RNA, 16 nt, synthetic construct
  misc_feature 1..16: note = Synthetic
  source 1..16: mol_type = other RNA
tgggagacgtcccacc

SEQ ID NO: 787 - RNA, 23 nt, synthetic construct
  misc_feature 1..23: note = Synthetic
  variation 20..23: note = u may or may not be present
  source 1..23: mol_type = other RNA
tgggagacgtcccaccttttttt

SEQ ID NO: 788 - RNA, 28 nt, synthetic construct
  misc_feature 1..28: note = Synthetic
  variation 25..28: note = u may or may not be present
  source 1..28: mol_type = other RNA
ccatcagttgacaccctgaggttttttt

SEQ ID NO: 789 - RNA, 31 nt, synthetic construct
  misc_feature 1..31: note = Synthetic
  variation 28..31: note = u may or may not be present
  source 1..31: mol_type = other RNA
catgcgattagaaataatcgcatgttttttt

SEQ ID NO: 790 - protein, 16 aa, synthetic construct
  REGION 1..16: note = Synthetic
RQIKIWFQNRRMKWKK

SEQ ID NO: 791-823 - skipped (33 entries)

SEQ ID NO: 824 - RNA, 96 nt, synthetic construct
  misc_feature 1..96: note = Synthetic
  source 1..96: mol_type = other RNA
ctactctctctttctgggccgttttagagctagaaatagcaagttaaaataaggctagtccgttatcaacttgaaaaagtggcaccgagtcggtgc

SEQ ID NO: 825 - RNA, 99 nt, synthetic construct
  misc_feature 1..99: note = Synthetic
  source 1..99: mol_type = other RNA
ctactctctctttctgggcgttttagagctagaaatagcaagttaaaataaggctagtccgttatcaacttgaaaaagtggcaccgagtcggtgctttt

SEQ ID NO: 826 - RNA, 96 nt, synthetic construct
  misc_feature 1..96: note = Synthetic
  source 1..96: mol_type = other RNA
tactctctctttctggctgggttttagagctagaaatagcaagttaaaataaggctagtccgttatcaacttgaaaaagtggcaccgagtcggtgc

SEQ ID NO: 827 - RNA, 96 nt, synthetic construct
  misc_feature 1..96: note = Synthetic
  source 1..96: mol_type = other RNA
ctctctctttctgggcctgggttttagagctagaaatagcaagttaaaataaggctagtccgttatcaacttgaaaaagtggcaccgagtcggtgc

SEQ ID NO: 828-900 - skipped (73 entries)

SEQ ID NO: 901 - RNA, 10 nt, synthetic construct
  misc_feature 1..10: note = Synthetic
  source 1..10: mol_type = other RNA
agcctcggca

SEQ ID NO: 902 - RNA, 12 nt, synthetic construct
  misc_feature 1..12: note = Synthetic
  source 1..12: mol_type = other RNA
atagcctcggca

SEQ ID NO: 903 - RNA, 14 nt, synthetic construct
  misc_feature 1..14: note = Synthetic
  source 1..14: mol_type = other RNA
ggatagcctcggca

SEQ ID NO: 904 - RNA, 20 nt, synthetic construct
  misc_feature 1..20: note = Synthetic
  source 1..20: mol_type = other RNA
cacgggctggataggctcca

SEQ ID NO: 905 - RNA, 22 nt, synthetic construct
  misc_feature 1..22: note = Synthetic
  source 1..22: mol_type = other RNA
ctcacgggctggataggctcca

SEQ ID NO: 906 - RNA, 24 nt, synthetic construct
  misc_feature 1..24: note = Synthetic
  source 1..24: mol_type = other RNA
gactcacgggctggataggctcca

SEQ ID NO: 907 - RNA, 26 nt, synthetic construct
  misc_feature 1..26: note = Synthetic
  source 1..26: mol_type = other RNA
gagactcacgggctggataggctcca

SEQ ID NO: 908 - RNA, 10 nt, synthetic construct
  misc_feature 1..10: note = Synthetic
  source 1..10: mol_type = other RNA
cctccttaca

SEQ ID NO: 909 - RNA, 12 nt, synthetic construct
  misc_feature 1..12: note = Synthetic
  source 1..12: mol_type = other RNA
agcctccttaca

SEQ ID NO: 910 - RNA, 14 nt, synthetic construct
  misc_feature 1..14: note = Synthetic
  source 1..14: mol_type = other RNA
atagcctccttaca

SEQ ID NO: 911 - RNA, 16 nt, synthetic construct
  misc_feature 1..16: note = Synthetic
  source 1..16: mol_type = other RNA
ggatagcctccttaca

SEQ ID NO: 912 - RNA, 22 nt, synthetic construct
  misc_feature 1..22: note = Synthetic
  source 1..22: mol_type = other RNA
cacgcttactggataggctcca

SEQ ID NO: 913 - RNA, 24 nt, synthetic construct
  misc_feature 1..24: note = Synthetic
  source 1..24: mol_type = other RNA
ctcacgcttactggataggctcca

SEQ ID NO: 914 - RNA, 26 nt, synthetic construct
  misc_feature 1..26: note = Synthetic
  source 1..26: mol_type = other RNA
gactcacgcttactggataggctcca

SEQ ID NO: 915 - RNA, 28 nt, synthetic construct
  misc_feature 1..28: note = Synthetic
  source 1..28: mol_type = other RNA
gagactcacgcttactggataggctcca

SEQ ID NO: 916 - RNA, 12 nt, synthetic construct
  misc_feature 1..12: note = Synthetic
  source 1..12: mol_type = other RNA
cctcttattaca

SEQ ID NO: 917 - RNA, 14 nt, synthetic construct
  misc_feature 1..14: note = Synthetic
  source 1..14: mol_type = other RNA
agcctcttattaca

SEQ ID NO: 918 - RNA, 16 nt, synthetic construct
  misc_feature 1..16: note = Synthetic
  source 1..16: mol_type = other RNA
atagcctcttattaca

SEQ ID NO: 919 - RNA, 18 nt, synthetic construct
  misc_feature 1..18: note = Synthetic
  source 1..18: mol_type = other RNA
ggatagcctcttattaca

SEQ ID NO: 920 - RNA, 24 nt, synthetic construct
  misc_feature 1..24: note = Synthetic
  source 1..24: mol_type = other RNA
cacgttattactggataggctcca

SEQ ID NO: 921 - RNA, 26 nt, synthetic construct
  misc_feature 1..26: note = Synthetic
  source 1..26: mol_type = other RNA
ctcacgttattactggataggctcca

SEQ ID NO: 922 - RNA, 28 nt, synthetic construct
  misc_feature 1..28: note = Synthetic
  source 1..28: mol_type = other RNA
gactcacgttattactggataggctcca

SEQ ID NO: 923 - RNA, 30 nt, synthetic construct
  misc_feature 1..30: note = Synthetic
  source 1..30: mol_type = other RNA
gagactcacgttattactggataggctcca

SEQ ID NO: 924 - RNA, 18 nt, synthetic construct
  misc_feature 1..18: note = Synthetic
  source 1..18: mol_type = other RNA
cacgctattaaggctcca

SEQ ID NO: 925 - RNA, 20 nt, synthetic construct
  misc_feature 1..20: note = Synthetic
  source 1..20: mol_type = other RNA
ctcacgctattaaggctcca

SEQ ID NO: 926 - RNA, 22 nt, synthetic construct
  misc_feature 1..22: note = Synthetic
  source 1..22: mol_type = other RNA
gactcacgctattaaggctcca

SEQ ID NO: 927 - RNA, 24 nt, synthetic construct
  misc_feature 1..24: note = Synthetic
  source 1..24: mol_type = other RNA
gagactcacgctattaaggctcca

SEQ ID NO: 928 - RNA, 17 nt, synthetic construct
  misc_feature 1..17: note = Synthetic
  source 1..17: mol_type = other RNA
gatagcctcttattaca

SEQ ID NO: 929 - RNA, 19 nt, synthetic construct
  misc_feature 1..19: note = Synthetic
  source 1..19: mol_type = other RNA
tggatagcctcttattaca

SEQ ID NO: 930 - RNA, 112 nt, synthetic construct
  misc_feature 1..112: note = Synthetic
  source 1..112: mol_type = other RNA
actctctctttctggcctgggttttagagctagaaatagcaagttaaaataaggctagtccgttatcaacttgaaaaagtggcaccgagtcggtgccctcggcaggccagaa

SEQ ID NO: 931 - RNA, 114 nt, synthetic construct
  misc_feature 1..114: note = Synthetic
  source 1..114: mol_type = other RNA
actctctctttctggcctgggttttagagctagaaatagcaagttaaaataaggctagtccgttatcaacttgaaaaagtggcaccgagtcggtgcagcctcggcaggccagaa

SEQ ID NO: 932 - RNA, 116 nt, synthetic construct
  misc_feature 1..116: note = Synthetic
  source 1..116: mol_type = other RNA
actctctctttctggcctgggttttagagctagaaatagcaagttaaaataaggctagtccgttatcaacttgaaaaagtggcaccgagtcggtgcatagcctcggcaggccagaa

SEQ ID NO: 933 - RNA, 118 nt, synthetic construct
  misc_feature 1..118: note = Synthetic
  source 1..118: mol_type = other RNA
actctctctttctggcctgggttttagagctagaaatagcaagttaaaataaggctagtccgttatcaacttgaaaaagtggcaccgagtcggtgcggatagcctcggcaggccagaa

SEQ ID NO: 934 - RNA, 114 nt, synthetic construct
  misc_feature 1..114: note = Synthetic
  source 1..114: mol_type = other RNA
actctctctttctggcctgggttttagagctagaaatagcaagttaaaataaggctagtccgttatcaacttgaaaaagtggcaccgagtcggtgccctcggcaggccagaaag

SEQ ID NO: 935 - RNA, 116 nt, synthetic construct
  misc_feature 1..116: note = Synthetic
  source 1..116: mol_type = other RNA
actctctctttctggcctgggttttagagctagaaatagcaagttaaaataaggctagtccgttatcaacttgaaaaagtggcaccgagtcggtgcagcctcggcaggccagaaag

SEQ ID NO: 936 - RNA, 118 nt, synthetic construct
  misc_feature 1..118: note = Synthetic
  source 1..118: mol_type = other RNA
actctctctttctggcctgggttttagagctagaaatagcaagttaaaataaggctagtccgttatcaacttgaaaaagtggcaccgagtcggtgcatagcctcggcaggccagaaag

SEQ ID NO: 937 - RNA, 120 nt, synthetic construct
  misc_feature 1..120: note = Synthetic
  source 1..120: mol_type = other RNA
actctctctttctggcctgggttttagagctagaaatagcaagttaaaataaggctagtccgttatcaacttgaaaaagtggcaccgagtcggtgcggatagcctcggcaggccagaaag

SEQ ID NO: 938 - RNA, 116 nt, synthetic construct
  misc_feature 1..116: note = Synthetic
  source 1..116: mol_type = other RNA
actctctctttctggcctgggttttagagctagaaatagcaagttaaaataaggctagtccgttatcaacttgaaaaagtggcaccgagtcggtgccctcggcaggccagaaagag

SEQ ID NO: 939 - RNA, 118 nt, synthetic construct
  misc_feature 1..118: note = Synthetic
  source 1..118: mol_type = other RNA
actctctctttctggcctgggttttagagctagaaatagcaagttaaaataaggctagtccgttatcaacttgaaaaagtggcaccgagtcggtgcagcctcggcaggccagaaagag

SEQ ID NO: 940 - RNA, 120 nt, synthetic construct
  misc_feature 1..120: note = Synthetic
  source 1..120: mol_type = other RNA
actctctctttctggcctgggttttagagctagaaatagcaagttaaaataaggctagtccgttatcaacttgaaaaagtggcaccgagtcggtgcatagcctcggcaggccagaaagag

SEQ ID NO: 941 - RNA, 122 nt, synthetic construct
  misc_feature 1..122: note = Synthetic
  source 1..122: mol_type = other RNA
actctctctttctggcctgggttttagagctagaaatagcaagttaaaataaggctagtccgttatcaacttgaaaaagtggcaccgagtcggtgcggatagcctcggcaggccagaaagag

SEQ ID NO: 942 - RNA, 124 nt, synthetic construct
  misc_feature 1..124: note = Synthetic
  source 1..124: mol_type = other RNA
actctctctttctggcctgggttttagagctagaaatagcaagttaaaataaggctagtccgttatcaacttgaaaaagtggcaccgagtcggtgccacgggctggataggctccaggccagaa

SEQ ID NO: 943 - RNA, 126 nt, synthetic construct
  misc_feature 1..126: note = Synthetic
  source 1..126: mol_type = other RNA
actctctctttctggcctgggttttagagctagaaatagcaagttaaaataaggctagtccgttatcaacttgaaaaagtggcaccgagtcggtgcctcacgggctggataggctccaggccagaa

SEQ ID NO: 944 - RNA, 128 nt, synthetic construct
  misc_feature 1..128: note = Synthetic
  source 1..128: mol_type = other RNA
actctctctttctggcctgggttttagagctagaaatagcaagttaaaataaggctagtccgttatcaacttgaaaaagtggcaccgagtcggtgcgactcacgggctggataggctccaggccagaa

SEQ ID NO: 945 - RNA, 130 nt, synthetic construct
  misc_feature 1..130: note = Synthetic
  source 1..130: mol_type = other RNA
actctctctttctggcctgggttttagagctagaaatagcaagttaaaataaggctagtccgttatcaacttgaaaaagtggcaccgagtcggtgcgagactcacgggctggataggctccaggccagaa

SEQ ID NO: 946 - RNA, 126 nt, synthetic construct
  misc_feature 1..126: note = Synthetic
  source 1..126: mol_type = other RNA
actctctctttctggcctgggttttagagctagaaatagcaagttaaaataaggctagtccgttatcaacttgaaaaagtggcaccgagtcggtgccacgggctggataggctccaggccagaaag

SEQ ID NO: 947 - RNA, 128 nt, synthetic construct
  misc_feature 1..128: note = Synthetic
  source 1..128: mol_type = other RNA
actctctctttctggcctgggttttagagctagaaatagcaagttaaaataaggctagtccgttatcaacttgaaaaagtggcaccgagtcggtgcctcacgggctggataggctccaggccagaaag

SEQ ID NO: 948 - RNA, 130 nt, synthetic construct
  misc_feature 1..130: note = Synthetic
  source 1..130: mol_type = other RNA
actctctctttctggcctgggttttagagctagaaatagcaagttaaaataaggctagtccgttatcaacttgaaaaagtggcaccgagtcggtgcgactcacgggctggataggctccaggccagaaag

SEQ ID NO: 949 - RNA, 132 nt, synthetic construct
  misc_feature 1..132: note = Synthetic
  source 1..132: mol_type = other RNA
actctctctttctggcctgggttttagagctagaaatagcaagttaaaataaggctagtccgttatcaacttgaaaaagtggcaccgagtcggtgcgagactcacgggctggataggctccaggccagaaag

SEQ ID NO: 950 - RNA, 128 nt, synthetic construct
  misc_feature 1..128: note = Synthetic
  source 1..128: mol_type = other RNA
actctctctttctggcctgggttttagagctagaaatagcaagttaaaataaggctagtccgttatcaacttgaaaaagtggcaccgagtcggtgccacgggctggataggctccaggccagaaagag

SEQ ID NO: 951 - RNA, 130 nt, synthetic construct
  misc_feature 1..130: note = Synthetic
  source 1..130: mol_type = other RNA
actctctctttctggcctgggttttagagctagaaatagcaagttaaaataaggctagtccgttatcaacttgaaaaagtggcaccgagtcggtgcctcacgggctggataggctccaggccagaaagag

SEQ ID NO: 952 - RNA, 132 nt, synthetic construct
  misc_feature 1..132: note = Synthetic
  source 1..132: mol_type = other RNA
actctctctttctggcctgggttttagagctagaaatagcaagttaaaataaggctagtccgttatcaacttgaaaaagtggcaccgagtcggtgcgactcacgggctggataggctccaggccagaaagag

SEQ ID NO: 953 - RNA, 134 nt, synthetic construct
  misc_feature 1..134: note = Synthetic
  source 1..134: mol_type = other RNA
actctctctttctggcctgggttttagagctagaaatagcaagttaaaataaggctagtccgttatcaacttgaaaaagtggcaccgagtcggtgcgagactcacgggctggataggctccaggccagaaagag

SEQ ID NO: 954 - RNA, 114 nt, synthetic construct
  misc_feature 1..114: note = Synthetic
  source 1..114: mol_type = other RNA
actctctctttctggcctgggttttagagctagaaatagcaagttaaaataaggctagtccgttatcaacttgaaaaagtggcaccgagtcggtgccctccttacaggccagaa

SEQ ID NO: 955 - RNA, 116 nt, synthetic construct
  misc_feature 1..116: note = Synthetic
  source 1..116: mol_type = other RNA
actctctctttctggcctgggttttagagctagaaatagcaagttaaaataaggctagtccgttatcaacttgaaaaagtggcaccgagtcggtgcagcctccttacaggccagaa

SEQ ID NO: 956 - RNA, 118 nt, synthetic construct
  misc_feature 1..118: note = Synthetic
  source 1..118: mol_type = other RNA
actctctctttctggcctgggttttagagctagaaatagcaagttaaaataaggctagtccgttatcaacttgaaaaagtggcaccgagtcggtgcatagcctccttacaggccagaa

SEQ ID NO: 957 - RNA, 120 nt, synthetic construct
  misc_feature 1..120: note = Synthetic
  source 1..120: mol_type = other RNA
actctctctttctggcctgggttttagagctagaaatagcaagttaaaataaggctagtccgttatcaacttgaaaaagtggcaccgagtcggtgcggatagcctccttacaggccagaa

SEQ ID NO: 958 - RNA, 116 nt, synthetic construct
  misc_feature 1..116: note = Synthetic
  source 1..116: mol_type = other RNA
actctctctttctggcctgggttttagagctagaaatagcaagttaaaataaggctagtccgttatcaacttgaaaaagtggcaccgagtcggtgccctccttacaggccagaaag

SEQ ID NO: 959 - RNA, 118 nt, synthetic construct
  misc_feature 1..118: note = Synthetic
  source 1..118: mol_type = other RNA
actctctctttctggcctgggttttagagctagaaatagcaagttaaaataaggctagtccgttatcaacttgaaaaagtggcaccgagtcggtgcagcctccttacaggccagaaag

SEQ ID NO: 960 - RNA, 120 nt, synthetic construct
  misc_feature 1..120: note = Synthetic
  source 1..120: mol_type = other RNA
actctctctttctggcctgggttttagagctagaaatagcaagttaaaataaggctagtccgttatcaacttgaaaaagtggcaccgagtcggtgcatagcctccttacaggccagaaag

SEQ ID NO: 961 - RNA, 122 nt, synthetic construct
  misc_feature 1..122: note = Synthetic
  source 1..122: mol_type = other RNA
actctctctttctggcctgggttttagagctagaaatagcaagttaaaataaggctagtccgttatcaacttgaaaaagtggcaccgagtcggtgcggatagcctccttacaggccagaaag

SEQ ID NO: 962 - RNA, 118 nt, synthetic construct
  misc_feature 1..118: note = Synthetic
  source 1..118: mol_type = other RNA
actctctctttctggcctgggttttagagctagaaatagcaagttaaaataaggctagtccgttatcaacttgaaaaagtggcaccgagtcggtgccctccttacaggccagaaagag

SEQ ID NO: 963 - RNA, 120 nt, synthetic construct
  misc_feature 1..120: note = Synthetic
  source 1..120: mol_type = other RNA
actctctctttctggcctgggttttagagctagaaatagcaagttaaaataaggctagtccgttatcaacttgaaaaagtggcaccgagtcggtgcagcctccttacaggccagaaagag

SEQ ID NO: 964 - RNA, 122 nt, synthetic construct
  misc_feature 1..122: note = Synthetic
  source 1..122: mol_type = other RNA
actctctctttctggcctgggttttagagctagaaatagcaagttaaaataaggctagtccgttatcaacttgaaaaagtggcaccgagtcggtgcatagcctccttacaggccagaaagag

SEQ ID NO: 965 - RNA, 124 nt, synthetic construct
  misc_feature 1..124: note = Synthetic
  source 1..124: mol_type = other RNA
actctctctttctggcctgggttttagagctagaaatagcaagttaaaataaggctagtccgttatcaacttgaaaaagtggcaccgagtcggtgcggatagcctccttacaggccagaaagag

SEQ ID NO: 966 - RNA, 126 nt, synthetic construct
  misc_feature 1..126: note = Synthetic
  source 1..126: mol_type = other RNA
actctctctttctggcctgggttttagagctagaaatagcaagttaaaataaggctagtccgttatcaacttgaaaaagtggcaccgagtcggtgccacgcttactggataggctccaggccagaa

SEQ ID NO: 967 - RNA, 128 nt, synthetic construct
  misc_feature 1..128: note = Synthetic
  source 1..128: mol_type = other RNA
actctctctttctggcctgggttttagagctagaaatagcaagttaaaataaggctagtccgttatcaacttgaaaaagtggcaccgagtcggtgcctcacgcttactggataggctccaggccagaa

SEQ ID NO: 968 - RNA, 130 nt, synthetic construct
  misc_feature 1..130: note = Synthetic
  source 1..130: mol_type = other RNA
actctctctttctggcctgggttttagagctagaaatagcaagttaaaataaggctagtccgttatcaacttgaaaaagtggcaccgagtcggtgcgactcacgcttactggataggctccaggccagaa

SEQ ID NO: 969 - RNA, 132 nt, synthetic construct
  misc_feature 1..132: note = Synthetic
  source 1..132: mol_type = other RNA
actctctctttctggcctgggttttagagctagaaatagcaagttaaaataaggctagtccgttatcaacttgaaaaagtggcaccgagtcggtgcgagactcacgcttactggataggctccaggccagaa

SEQ ID NO: 970 - RNA, 128 nt, synthetic construct
  misc_feature 1..128: note = Synthetic
  source 1..128: mol_type = other RNA
actctctctttctggcctgggttttagagctagaaatagcaagttaaaataaggctagtccgttatcaacttgaaaaagtggcaccgagtcggtgccacgcttactggataggctccaggccagaaag

SEQ ID NO: 971 - RNA, 130 nt, synthetic construct
  misc_feature 1..130: note = Synthetic
  source 1..130: mol_type = other RNA
actctctctttctggcctgggttttagagctagaaatagcaagttaaaataaggctagtccgttatcaacttgaaaaagtggcaccgagtcggtgcctcacgcttactggataggctccaggccagaaag

SEQ ID NO: 972 - RNA, 132 nt, synthetic construct
  misc_feature 1..132: note = Synthetic
  source 1..132: mol_type = other RNA
actctctctttctggcctgggttttagagctagaaatagcaagttaaaataaggctagtccgttatcaacttgaaaaagtggcaccgagtcggtgcgactcacgcttactggataggctccaggccagaaag

SEQ ID NO: 973 - RNA, 134 nt, synthetic construct
  misc_feature 1..134: note = Synthetic
  source 1..134: mol_type = other RNA
actctctctttctggcctgggttttagagctagaaatagcaagttaaaataaggctagtccgttatcaacttgaaaaagtggcaccgagtcggtgcgagactcacgcttactggataggctccaggccagaaag

SEQ ID NO: 974 - RNA, 132 nt, synthetic construct
  misc_feature 1..132: note = Synthetic
  source 1..132: mol_type = other RNA
actctctctttctggcctgggttttagagctagaaatagcaagttaaaataaggctagtccgttatcaacttgaaaaagtggcaccgagtcggtgcctcacgcttactggataggctccaggccagaaagag

SEQ ID NO: 975 - RNA, 134 nt, synthetic construct
  misc_feature 1..134: note = Synthetic
  source 1..134: mol_type = other RNA
actctctctttctggcctgggttttagagctagaaatagcaagttaaaataaggctagtccgttatcaacttgaaaaagtggcaccgagtcggtgcgactcacgcttactggataggctccaggccagaaagag

SEQ ID NO: 976 - RNA, 136 nt, synthetic construct
  misc_feature 1..136: note = Synthetic
  source 1..136: mol_type = other RNA
actctctctttctggcctgggttttagagctagaaatagcaagttaaaataaggctagtccgttatcaacttgaaaaagtggcaccgagtcggtgcgagactcacgcttactggataggctccaggccagaaagag

SEQ ID NO: 977 - RNA, 116 nt, synthetic construct
  misc_feature 1..116: note = Synthetic
  source 1..116: mol_type = other RNA
actctctctttctggcctgggttttagagctagaaatagcaagttaaaataaggctagtccgttatcaacttgaaaaagtggcaccgagtcggtgccctcttattacaggccagaa

SEQ ID NO: 978 - RNA, 118 nt, synthetic construct
  misc_feature 1..118: note = Synthetic
  source 1..118: mol_type = other RNA
actctctctttctggcctgggttttagagctagaaatagcaagttaaaataaggctagtccgttatcaacttgaaaaagtggcaccgagtcggtgcagcctcttattacaggccagaa

SEQ ID NO: 979 - RNA, 120 nt, synthetic construct
  misc_feature 1..120: note = Synthetic
  source 1..120: mol_type = other RNA
actctctctttctggcctgggttttagagctagaaatagcaagttaaaataaggctagtccgttatcaacttgaaaaagtggcaccgagtcggtgcatagcctcttattacaggccagaa

SEQ ID NO: 980 - RNA, 122 nt, synthetic construct
  misc_feature 1..122: note = Synthetic
  source 1..122: mol_type = other RNA
actctctctttctggcctgggttttagagctagaaatagcaagttaaaataaggctagtccgttatcaacttgaaaaagtggcaccgagtcggtgcggatagcctcttattacaggccagaa

SEQ ID NO: 981 - RNA, 118 nt, synthetic construct
  misc_feature 1..118: note = Synthetic
  source 1..118: mol_type = other RNA
actctctctttctggcctgggttttagagctagaaatagcaagttaaaataaggctagtccgttatcaacttgaaaaagtggcaccgagtcggtgccctcttattacaggccagaaag

SEQ ID NO: 982 - RNA, 120 nt, synthetic construct
  misc_feature 1..120: note = Synthetic
  source 1..120: mol_type = other RNA
actctctctttctggcctgggttttagagctagaaatagcaagttaaaataaggctagtccgttatcaacttgaaaaagtggcaccgagtcggtgcagcctcttattacaggccagaaag

SEQ ID NO: 983 - RNA, 122 nt, synthetic construct
  misc_feature 1..122: note = Synthetic
  source 1..122: mol_type = other RNA
actctctctttctggcctgggttttagagctagaaatagcaagttaaaataaggctagtccgttatcaacttgaaaaagtggcaccgagtcggtgcatagcctcttattacaggccagaaag

SEQ ID NO: 984 - RNA, 124 nt, synthetic construct
  misc_feature 1..124: note = Synthetic
  source 1..124: mol_type = other RNA
actctctctttctggcctgggttttagagctagaaatagcaagttaaaataaggctagtccgttatcaacttgaaaaagtggcaccgagtcggtgcggatagcctcttattacaggccagaaag

SEQ ID NO: 985 - RNA, 120 nt, synthetic construct
  misc_feature 1..120: note = Synthetic
  source 1..120: mol_type = other RNA
actctctctttctggcctgggttttagagctagaaatagcaagttaaaataaggctagtccgttatcaacttgaaaaagtggcaccgagtcggtgccctcttattacaggccagaaagag

SEQ ID NO: 986 - RNA, 122 nt, synthetic construct
  misc_feature 1..122: note = Synthetic
  source 1..122: mol_type = other RNA
actctctctttctggcctgggttttagagctagaaatagcaagttaaaataaggctagtccgttatcaacttgaaaaagtggcaccgagtcggtgcagcctcttattacaggccagaaagag

SEQ ID NO: 987 - RNA, 124 nt, synthetic construct
  misc_feature 1..124: note = Synthetic
  source 1..124: mol_type = other RNA
actctctctttctggcctgggttttagagctagaaatagcaagttaaaataaggctagtccgttatcaacttgaaaaagtggcaccgagtcggtgcatagcctcttattacaggccagaaagag

SEQ ID NO: 988 - RNA, 126 nt, synthetic construct
  misc_feature 1..126: note = Synthetic
  source 1..126: mol_type = other RNA
actctctctttctggcctgggttttagagctagaaatagcaagttaaaataaggctagtccgttatcaacttgaaaaagtggcaccgagtcggtgcggatagcctcttattacaggccagaaagag

SEQ ID NO: 989 - RNA, 128 nt, synthetic construct
  misc_feature 1..128: note = Synthetic
  source 1..128: mol_type = other RNA
actctctctttctggcctgggttttagagctagaaatagcaagttaaaataaggctagtccgttatcaacttgaaaaagtggcaccgagtcggtgccacgttattactggataggctccaggccagaa

SEQ ID NO: 990 - RNA, 130 nt, synthetic construct
  misc_feature 1..130: note = Synthetic
  source 1..130: mol_type = other RNA
actctctctttctggcctgggttttagagctagaaatagcaagttaaaataaggctagtccgttatcaacttgaaaaagtggcaccgagtcggtgcctcacgttattactggataggctccaggccagaa

SEQ ID NO: 991 - RNA, 132 nt, synthetic construct
  misc_feature 1..132: note = Synthetic
  source 1..132: mol_type = other RNA
actctctctttctggcctgggttttagagctagaaatagcaagttaaaataaggctagtccgttatcaacttgaaaaagtggcaccgagtcggtgcgactcacgttattactggataggctccaggccagaa

SEQ ID NO: 992 - RNA, 134 nt, synthetic construct
  misc_feature 1..134: note = Synthetic
  source 1..134: mol_type = other RNA
actctctctttctggcctgggttttagagctagaaatagcaagttaaaataaggctagtccgttatcaacttgaaaaagtggcaccgagtcggtgcgagactcacgttattactggataggctccaggccagaa

SEQ ID NO: 993 - RNA, 130 nt, synthetic construct
  misc_feature 1..130: note = Synthetic
  source 1..130: mol_type = other RNA
actctctctttctggcctgggttttagagctagaaatagcaagttaaaataaggctagtccgttatcaacttgaaaaagtggcaccgagtcggtgccacgttattactggataggctccaggccagaaag

SEQ ID NO: 994 - RNA, 132 nt, synthetic construct
  misc_feature 1..132: note = Synthetic
  source 1..132: mol_type = other RNA
actctctctttctggcctgggttttagagctagaaatagcaagttaaaataaggctagtccgttatcaacttgaaaaagtggcaccgagtcggtgcctcacgttattactggataggctccaggccagaaag

SEQ ID NO: 995 - RNA, 134 nt, synthetic construct
  misc_feature 1..134: note = Synthetic
  source 1..134: mol_type = other RNA
actctctctttctggcctgggttttagagctagaaatagcaagttaaaataaggctagtccgttatcaacttgaaaaagtggcaccgagtcggtgcgactcacgttattactggataggctccaggccagaaag

SEQ ID NO: 996 - RNA, 136 nt, synthetic construct
  misc_feature 1..136: note = Synthetic
  source 1..136: mol_type = other RNA
actctctctttctggcctgggttttagagctagaaatagcaagttaaaataaggctagtccgttatcaacttgaaaaagtggcaccgagtcggtgcgagactcacgttattactggataggctccaggccagaaag

SEQ ID NO: 997 - RNA, 132 nt, synthetic construct
  misc_feature 1..132: note = Synthetic
  source 1..132: mol_type = other RNA
actctctctttctggcctgggttttagagctagaaatagcaagttaaaataaggctagtccgttatcaacttgaaaaagtggcaccgagtcggtgccacgttattactggataggctccaggccagaaagag

SEQ ID NO: 998 - RNA, 134 nt, synthetic construct
  misc_feature 1..134: note = Synthetic
  source 1..134: mol_type = other RNA
actctctctttctggcctgggttttagagctagaaatagcaagttaaaataaggctagtccgttatcaacttgaaaaagtggcaccgagtcggtgcctcacgttattactggataggctccaggccagaaagag

SEQ ID NO: 999 - RNA, 136 nt, synthetic construct
  misc_feature 1..136: note = Synthetic
  source 1..136: mol_type = other RNA
actctctctttctggcctgggttttagagctagaaatagcaagttaaaataaggctagtccgttatcaacttgaaaaagtggcaccgagtcggtgcgactcacgttattactggataggctccaggccagaaagag

SEQ ID NO: 1000 - RNA, 138 nt, synthetic construct
  misc_feature 1..138: note = Synthetic
  source 1..138: mol_type = other RNA
actctctctttctggcctgggttttagagctagaaatagcaagttaaaataaggctagtccgttatcaacttgaaaaagtggcaccgagtcggtgcgagactcacgttattactggataggctccaggccagaaagag

SEQ ID NO: 1001 - RNA, 122 nt, synthetic construct
  misc_feature 1..122: note = Synthetic
  source 1..122: mol_type = other RNA
actctctctttctggcctgggttttagagctagaaatagcaagttaaaataaggctagtccgttatcaacttgaaaaagtggcaccgagtcggtgccacgctattaaggctccaggccagaa

SEQ ID NO: 1002 - RNA, 124 nt, synthetic construct
  misc_feature 1..124: note = Synthetic
  source 1..124: mol_type = other RNA
actctctctttctggcctgggttttagagctagaaatagcaagttaaaataaggctagtccgttatcaacttgaaaaagtggcaccgagtcggtgcctcacgctattaaggctccaggccagaa

SEQ ID NO: 1003 - RNA, 126 nt, synthetic construct
  misc_feature 1..126: note = Synthetic
  source 1..126: mol_type = other RNA
actctctctttctggcctgggttttagagctagaaatagcaagttaaaataaggctagtccgttatcaacttgaaaaagtggcaccgagtcggtgcgactcacgctattaaggctccaggccagaa

SEQ ID NO: 1004 - RNA, 128 nt, synthetic construct
  misc_feature 1..128: note = Synthetic
  source 1..128: mol_type = other RNA
actctctctttctggcctgggttttagagctagaaatagcaagttaaaataaggctagtccgttatcaacttgaaaaagtggcaccgagtcggtgcgagactcacgctattaaggctccaggccagaa

SEQ ID NO: 1005 - RNA, 124 nt, synthetic construct
  misc_feature 1..124: note = Synthetic
  source 1..124: mol_type = other RNA
actctctctttctggcctgggttttagagctagaaatagcaagttaaaataaggctagtccgttatcaacttgaaaaagtggcaccgagtcggtgccacgctattaaggctccaggccagaaag

SEQ ID NO: 1006 - RNA, 126 nt, synthetic construct
  misc_feature 1..126: note = Synthetic
  source 1..126: mol_type = other RNA
actctctctttctggcctgggttttagagctagaaatagcaagttaaaataaggctagtccgttatcaacttgaaaaagtggcaccgagtcggtgcctcacgctattaaggctccaggccagaaag

SEQ ID NO: 1007 - RNA, 128 nt, synthetic construct
  misc_feature 1..128: note = Synthetic
  source 1..128: mol_type = other RNA
actctctctttctggcctgggttttagagctagaaatagcaagttaaaataaggctagtccgttatcaacttgaaaaagtggcaccgagtcggtgcgactcacgctattaaggctccaggccagaaag

SEQ ID NO: 1008 - RNA, 130 nt, synthetic construct
  misc_feature 1..130: note = Synthetic
  source 1..130: mol_type = other RNA
actctctctttctggcctgggttttagagctagaaatagcaagttaaaataaggctagtccgttatcaacttgaaaaagtggcaccgagtcggtgcgagactcacgctattaaggctccaggccagaaag

SEQ ID NO: 1009 - RNA, 126 nt, synthetic construct
  misc_feature 1..126: note = Synthetic
  source 1..126: mol_type = other RNA
actctctctttctggcctgggttttagagctagaaatagcaagttaaaataaggctagtccgttatcaacttgaaaaagtggcaccgagtcggtgccacgctattaaggctccaggccagaaagag

SEQ ID NO: 1010 - RNA, 128 nt, synthetic construct
  misc_feature 1..128: note = Synthetic
  source 1..128: mol_type = other RNA
actctctctttctggcctgggttttagagctagaaatagcaagttaaaataaggctagtccgttatcaacttgaaaaagtggcaccgagtcggtgcctcacgctattaaggctccaggccagaaagag

SEQ ID NO: 1011 - RNA, 130 nt, synthetic construct
  misc_feature 1..130: note = Synthetic
  source 1..130: mol_type = other RNA
actctctctttctggcctgggttttagagctagaaatagcaagttaaaataaggctagtccgttatcaacttgaaaaagtggcaccgagtcggtgcgactcacgctattaaggctccaggccagaaagag

SEQ ID NO: 1012 - RNA, 132 nt, synthetic construct
  misc_feature 1..132: note = Synthetic
  source 1..132: mol_type = other RNA
actctctctttctggcctgggttttagagctagaaatagcaagttaaaataaggctagtccgttatcaacttgaaaaagtggcaccgagtcggtgcgagactcacgctattaaggctccaggccagaaagag

SEQ ID NO: 1013 - RNA, 125 nt, synthetic construct
  misc_feature 1..125: note = Synthetic
  source 1..125: mol_type = other RNA
actctctctttctggcctgggttttagagctagaaatagcaagttaaaataaggctagtccgttatcaacttgaaaaagtggcaccgagtcggtgcgatagcctcttattacaggccagaaagag

SEQ ID NO: 1014 - RNA, 123 nt, synthetic construct
  misc_feature 1..123: note = Synthetic
  source 1..123: mol_type = other RNA
actctctctttctggcctgggttttagagctagaaatagcaagttaaaataaggctagtccgttatcaacttgaaaaagtggcaccgagtcggtgcgatagcctcttattacaggccagaaag

SEQ ID NO: 1015 - RNA, 121 nt, synthetic construct
  misc_feature 1..121: note = Synthetic
  source 1..121: mol_type = other RNA
actctctctttctggcctgggttttagagctagaaatagcaagttaaaataaggctagtccgttatcaacttgaaaaagtggcaccgagtcggtgcgatagcctcttattacaggccagaa

SEQ ID NO: 1016 - RNA, 127 nt, synthetic construct
  misc_feature 1..127: note = Synthetic
  source 1..127: mol_type = other RNA
actctctctttctggcctgggttttagagctagaaatagcaagttaaaataaggctagtccgttatcaacttgaaaaagtggcaccgagtcggtgctggatagcctcttattacaggccagaaagag

SEQ ID NO: 1017 - RNA, 20 nt, synthetic construct
  misc_feature 1..20: note = Synthetic
  source 1..20: mol_type = other RNA
ggccgagatgtctcgctccg

SEQ ID NO: 1018 - RNA, 20 nt, synthetic construct
  misc_feature 1..20: note = Synthetic
  source 1..20: mol_type = other RNA
tcacgctggatagcctcggc

SEQ ID NO: 1019 - RNA, 20 nt, synthetic construct
  misc_feature 1..20: note = Synthetic
  source 1..20: mol_type = other RNA
tcacgggctggataggctcc

SEQ ID NO: 1020 - RNA, 20 nt, synthetic construct
  misc_feature 1..20: note = Synthetic
  source 1..20: mol_type = other RNA
acgctggatagcctccttac

SEQ ID NO: 1021 - RNA, 20 nt, synthetic construct
  misc_feature 1..20: note = Synthetic
  source 1..20: mol_type = other RNA
acgcttactggataggctcc

SEQ ID NO: 1022 - RNA, 20 nt, synthetic construct
  misc_feature 1..20: note = Synthetic
  source 1..20: mol_type = other RNA
gctggatagcctcttattac

SEQ ID NO: 1023 - RNA, 20 nt, synthetic construct
  misc_feature 1..20: note = Synthetic
  source 1..20: mol_type = other RNA
gttattactggataggctcc

SEQ ID NO: 1024 - RNA, 20 nt, synthetic construct
  misc_feature 1..20: note = Synthetic
  source 1..20: mol_type = other RNA
actcacgctattaaggctcc

SEQ ID NO: 1025 - RNA, 95 nt, synthetic construct
  misc_feature 1..95: note = Synthetic
  source 1..95: mol_type = other RNA
ggccgagatgtctcgctccggttttagagctagaaatagcaagttaaaataaggctagtccgttatcaacttgaaaaagtggcaccgagtcggtg

SEQ ID NO: 1026 - RNA, 95 nt, synthetic construct
  misc_feature 1..95: note = Synthetic
  source 1..95: mol_type = other RNA
tcacgctggatagcctcggcgttttagagctagaaatagcaagttaaaataaggctagtccgttatcaacttgaaaaagtggcaccgagtcggtg

SEQ ID NO: 1027 - RNA, 95 nt, synthetic construct
  misc_feature 1..95: note = Synthetic
  source 1..95: mol_type = other RNA
tcacgggctggataggctccgttttagagctagaaatagcaagttaaaataaggctagtccgttatcaacttgaaaaagtggcaccgagtcggtg

SEQ ID NO: 1028 - RNA, 95 nt, synthetic construct
  misc_feature 1..95: note = Synthetic
  source 1..95: mol_type = other RNA
acgctggatagcctccttacgttttagagctagaaatagcaagttaaaataaggctagtccgttatcaacttgaaaaagtggcaccgagtcggtg

SEQ ID NO: 1029 - RNA, 95 nt, synthetic construct
  misc_feature 1..95: note = Synthetic
  source 1..95: mol_type = other RNA
acgcttactggataggctccgttttagagctagaaatagcaagttaaaataaggctagtccgttatcaacttgaaaaagtggcaccgagtcggtg

SEQ ID NO: 1030 - RNA, 95 nt, synthetic construct
  misc_feature 1..95: note = Synthetic
  source 1..95: mol_type = other RNA
gctggatagcctcttattacgttttagagctagaaatagcaagttaaaataaggctagtccgttatcaacttgaaaaagtggcaccgagtcggtg

SEQ ID NO: 1031 - RNA, 95 nt, synthetic construct
  misc_feature 1..95: note = Synthetic
  source 1..95: mol_type = other RNA
gttattactggataggctccgttttagagctagaaatagcaagttaaaataaggctagtccgttatcaacttgaaaaagtggcaccgagtcggtg

SEQ ID NO: 1032 - RNA, 95 nt, synthetic construct
  misc_feature 1..95: note = Synthetic
  source 1..95: mol_type = other RNA
actcacgctattaaggctccgttttagagctagaaatagcaagttaaaataaggctagtccgttatcaacttgaaaaagtggcaccgagtcggtg

SEQ ID NO: 1033-1034 - skipped (2 entries)

SEQ ID NO: 1035 - RNA, 11 nt, synthetic construct
  misc_feature 1..11: note = Synthetic
  source 1..11: mol_type = other RNA
tggccttaccg

SEQ ID NO: 1036 - RNA, 13 nt, synthetic construct
  misc_feature 1..13: note = Synthetic
  source 1..13: mol_type = other RNA
cgtggccttaccg

SEQ ID NO: 1037 - RNA, 25 nt, synthetic construct
  misc_feature 1..25: note = Synthetic
  source 1..25: mol_type = other RNA
gatgcctctcgctccgtgggcttag

SEQ ID NO: 1038 - RNA, 27 nt, synthetic construct
  misc_feature 1..27: note = Synthetic
  source 1..27: mol_type = other RNA
gagatgcctctcgctccgtgggcttag

SEQ ID NO: 1039 - RNA, 29 nt, synthetic construct
  misc_feature 1..29: note = Synthetic
  source 1..29: mol_type = other RNA
ccgagatgcctctcgctccgtgggcttag

SEQ ID NO: 1040 - RNA, 31 nt, synthetic construct
  misc_feature 1..31: note = Synthetic
  source 1..31: mol_type = other RNA
ggccgagatgcctctcgctccgtgggcttag

SEQ ID NO: 1041 - skipped

SEQ ID NO: 1042 - RNA, 11 nt, synthetic construct
  misc_feature 1..11: note = Synthetic
  source 1..11: mol_type = other RNA
gccttataagg

SEQ ID NO: 1043 - RNA, 13 nt, synthetic construct
  misc_feature 1..13: note = Synthetic
  source 1..13: mol_type = other RNA
tggccttataagg

SEQ ID NO: 1044 - RNA, 15 nt, synthetic construct
  misc_feature 1..15: note = Synthetic
  source 1..15: mol_type = other RNA
cgtggccttataagg

SEQ ID NO: 1045 - RNA, 27 nt, synthetic construct
  misc_feature 1..27: note = Synthetic
  source 1..27: mol_type = other RNA
gatgtaagtctcgctccgtgggcttag

SEQ ID NO: 1046 - RNA, 29 nt, synthetic construct
  misc_feature 1..29: note = Synthetic
  source 1..29: mol_type = other RNA
gagatgtaagtctcgctccgtgggcttag

SEQ ID NO: 1047 - RNA, 31 nt, synthetic construct
  misc_feature 1..31: note = Synthetic
  source 1..31: mol_type = other RNA
ccgagatgtaagtctcgctccgtgggcttag

SEQ ID NO: 1048 - RNA, 33 nt, synthetic construct
  misc_feature 1..33: note = Synthetic
  source 1..33: mol_type = other RNA
ggccgagatgtaagtctcgctccgtgggcttag

SEQ ID NO: 1049 - RNA, 11 nt, synthetic construct
  misc_feature 1..11: note = Synthetic
  source 1..11: mol_type = other RNA
cttataataag

SEQ ID NO: 1050 - RNA, 13 nt, synthetic construct
  misc_feature 1..13: note = Synthetic
  source 1..13: mol_type = other RNA
gccttataataag

SEQ ID NO: 1051 - RNA, 15 nt, synthetic construct
  misc_feature 1..15: note = Synthetic
  source 1..15: mol_type = other RNA
tggccttataataag

SEQ ID NO: 1052 - RNA, 17 nt, synthetic construct
  misc_feature 1..17: note = Synthetic
  source 1..17: mol_type = other RNA
cgtggccttataataag

SEQ ID NO: 1053 - RNA, 29 nt, synthetic construct
  misc_feature 1..29: note = Synthetic
  source 1..29: mol_type = other RNA
gatgtaataatctcgctccgtgggcttag

SEQ ID NO: 1054 - RNA, 31 nt, synthetic construct
  misc_feature 1..31: note = Synthetic
  source 1..31: mol_type = other RNA
gagatgtaataatctcgctccgtgggcttag

SEQ ID NO: 1055 - RNA, 33 nt, synthetic construct
  misc_feature 1..33: note = Synthetic
  source 1..33: mol_type = other RNA
ccgagatgtaataatctcgctccgtgggcttag

SEQ ID NO: 1056 - RNA, 35 nt, synthetic construct
  misc_feature 1..35: note = Synthetic
  source 1..35: mol_type = other RNA
ggccgagatgtaataatctcgctccgtgggcttag

SEQ ID NO: 1057 - RNA, 23 nt, synthetic construct
  misc_feature 1..23: note = Synthetic
  source 1..23: mol_type = other RNA
gatgtaatgatccgtgggcttag

SEQ ID NO: 1058 - RNA, 25 nt, synthetic construct
  misc_feature 1..25: note = Synthetic
  source 1..25: mol_type = other RNA
gagatgtaatgatccgtgggcttag

SEQ ID NO: 1059 - RNA, 27 nt, synthetic construct
  misc_feature 1..27: note = Synthetic
  source 1..27: mol_type = other RNA
ccgagatgtaatgatccgtgggcttag

SEQ ID NO: 1060 - RNA, 29 nt, synthetic construct
  misc_feature 1..29: note = Synthetic
  source 1..29: mol_type = other RNA
ggccgagatgtaatgatccgtgggcttag

SEQ ID NO: 1061 - RNA, 12 nt, synthetic construct
  misc_feature 1..12: note = Synthetic
  source 1..12: mol_type = other RNA
ccttataataag

SEQ ID NO: 1062 - RNA, 16 nt, synthetic construct
  misc_feature 1..16: note = Synthetic
  source 1..16: mol_type = other RNA
gtggccttataataag

SEQ ID NO: 1063 - RNA, 19 nt, synthetic construct
  misc_feature 1..19: note = Synthetic
  source 1..19: mol_type = other RNA
tccgtggccttataataag

SEQ ID NO: 1064 - RNA, 111 nt, synthetic construct
  misc_feature 1..111: note = Synthetic
  source 1..111: mol_type = other RNA
gagtagcgcgagcacagctagttttagagctagaaatagcaagttaaaataaggctagtccgttatcaacttgaaaaagtggcaccgagtcggtgccttaccgctgtgctc

SEQ ID NO: 1065 - RNA, 113 nt, synthetic construct
  misc_feature 1..113: note = Synthetic
  source 1..113: mol_type = other RNA
gagtagcgcgagcacagctagttttagagctagaaatagcaagttaaaataaggctagtccgttatcaacttgaaaaagtggcaccgagtcggtgcgccttaccgctgtgctc

SEQ ID NO: 1066 - RNA, 115 nt, synthetic construct
  misc_feature 1..115: note = Synthetic
  source 1..115: mol_type = other RNA
gagtagcgcgagcacagctagttttagagctagaaatagcaagttaaaataaggctagtccgttatcaacttgaaaaagtggcaccgagtcggtgctggccttaccgctgtgctc

SEQ ID NO: 1067 - RNA, 117 nt, synthetic construct
  misc_feature 1..117: note = Synthetic
  source 1..117: mol_type = other RNA
gagtagcgcgagcacagctagttttagagctagaaatagcaagttaaaataaggctagtccgttatcaacttgaaaaagtggcaccgagtcggtgccgtggccttaccgctgtgctc

SEQ ID NO: 1068 - RNA, 113 nt, synthetic construct
  misc_feature 1..113: note = Synthetic
  source 1..113: mol_type = other RNA
gagtagcgcgagcacagctagttttagagctagaaatagcaagttaaaataaggctagtccgttatcaacttgaaaaagtggcaccgagtcggtgccttaccgctgtgctcgc

SEQ ID NO: 1069 - RNA, 115 nt, synthetic construct
  misc_feature 1..115: note = Synthetic
  source 1..115: mol_type = other RNA
gagtagcgcgagcacagctagttttagagctagaaatagcaagttaaaataaggctagtccgttatcaacttgaaaaagtggcaccgagtcggtgcgccttaccgctgtgctcgc

SEQ ID NO: 1070 - RNA, 117 nt, synthetic construct
  misc_feature 1..117: note = Synthetic
  source 1..117: mol_type = other RNA
gagtagcgcgagcacagctagttttagagctagaaatagcaagttaaaataaggctagtccgttatcaacttgaaaaagtggcaccgagtcggtgctggccttaccgctgtgctcgc

SEQ ID NO: 1071 - RNA, 119 nt, synthetic construct
  misc_feature 1..119: note = Synthetic
  source 1..119: mol_type = other RNA
gagtagcgcgagcacagctagttttagagctagaaatagcaagttaaaataaggctagtccgttatcaacttgaaaaagtggcaccgagtcggtgccgtggccttaccgctgtgctcgc

SEQ ID NO: 1072 - RNA, 115 nt, synthetic construct
  misc_feature 1..115: note = Synthetic
  source 1..115: mol_type = other RNA
gagtagcgcgagcacagctagttttagagctagaaatagcaagttaaaataaggctagtccgttatcaacttgaaaaagtggcaccgagtcggtgccttaccgctgtgctcgcgc

SEQ ID NO: 1073 - RNA, 117 nt, synthetic construct
  misc_feature 1..117: note = Synthetic
  source 1..117: mol_type = other RNA
gagtagcgcgagcacagctagttttagagctagaaatagcaagttaaaataaggctagtccgttatcaacttgaaaaagtggcaccgagtcggtgcgccttaccgctgtgctcgcgc

SEQ ID NO: 1074 - RNA, 119 nt, synthetic construct
  misc_feature 1..119: note = Synthetic
  source 1..119: mol_type = other RNA
gagtagcgcgagcacagctagttttagagctagaaatagcaagttaaaataaggctagtccgttatcaacttgaaaaagtggcaccgagtcggtgctggccttaccgctgtgctcgcgc

SEQ ID NO: 1075 - RNA, 121 nt, synthetic construct
  misc_feature 1..121: note = Synthetic
  source 1..121: mol_type = other RNA
gagtagcgcgagcacagctagttttagagctagaaatagcaagttaaaataaggctagtccgttatcaacttgaaaaagtggcaccgagtcggtgccgtggccttaccgctgtgctcgcgc

SEQ ID NO: 1076 - RNA, 129 nt, synthetic construct
  misc_feature 1..129: note = Synthetic
  source 1..129: mol_type = other RNA
gagtagcgcgagcacagctagttttagagctagaaatagcaagttaaaataaggctagtccgttatcaacttgaaaaagtggcaccgagtcggtgcgatgcctctcgctccgtgggcttagctgtgctc

SEQ ID NO: 1077 - RNA, 131 nt, synthetic construct
  misc_feature 1..131: note = Synthetic
  source 1..131: mol_type = other RNA
gagtagcgcgagcacagctagttttagagctagaaatagcaagttaaaataaggctagtccgttatcaacttgaaaaagtggcaccgagtcggtgcgagatgcctctcgctccgtgggcttagctgtgctc

SEQ ID NO: 1078 - RNA, 133 nt, synthetic construct
  misc_feature 1..133: note = Synthetic
  source 1..133: mol_type = other RNA
gagtagcgcgagcacagctagttttagagctagaaatagcaagttaaaataaggctagtccgttatcaacttgaaaaagtggcaccgagtcggtgcccgagatgcctctcgctccgtgggcttagctgtgctc

SEQ ID NO: 1079 - RNA, 135 nt, synthetic construct
  misc_feature 1..135: note = Synthetic
  source 1..135: mol_type = other RNA
gagtagcgcgagcacagctagttttagagctagaaatagcaagttaaaataaggctagtccgttatcaacttgaaaaagtggcaccgagtcggtgcggccgagatgcctctcgctccgtgggcttagctgtgctc

SEQ ID NO: 1080 - RNA, 131 nt, synthetic construct
  misc_feature 1..131: note = Synthetic
  source 1..131: mol_type = other RNA
gagtagcgcgagcacagctagttttagagctagaaatagcaagttaaaataaggctagtccgttatcaacttgaaaaagtggcaccgagtcggtgcgatgcctctcgctccgtgggcttagctgtgctcgc

SEQ ID NO: 1081 - RNA, 133 nt, synthetic construct
  misc_feature 1..133: note = Synthetic
  source 1..133: mol_type = other RNA
gagtagcgcgagcacagctagttttagagctagaaatagcaagttaaaataaggctagtccgttatcaacttgaaaaagtggcaccgagtcggtgcgagatgcctctcgctccgtgggcttagctgtgctcgc

SEQ ID NO: 1082 - RNA, 135 nt, synthetic construct
  misc_feature 1..135: note = Synthetic
  source 1..135: mol_type = other RNA
gagtagcgcgagcacagctagttttagagctagaaatagcaagttaaaataaggctagtccgttatcaacttgaaaaagtggcaccgagtcggtgcccgagatgcctctcgctccgtgggcttagctgtgctcgc

SEQ ID NO: 1083 - RNA, 137 nt, synthetic construct
  misc_feature 1..137: note = Synthetic
  source 1..137: mol_type = other RNA
gagtagcgcgagcacagctagttttagagctagaaatagcaagttaaaataaggctagtccgttatcaacttgaaaaagtggcaccgagtcggtgcggccgagatgcctctcgctccgtgggcttagctgtgctcgc

SEQ ID NO: 1084 - RNA, 133 nt, synthetic construct
  misc_feature 1..133: note = Synthetic
  source 1..133: mol_type = other RNA
gagtagcgcgagcacagctagttttagagctagaaatagcaagttaaaataaggctagtccgttatcaacttgaaaaagtggcaccgagtcggtgcgatgcctctcgctccgtgggcttagctgtgctcgcgc

SEQ ID NO: 1085 - RNA, 135 nt, synthetic construct
  misc_feature 1..135: note = Synthetic
  source 1..135: mol_type = other RNA
gagtagcgcgagcacagctagttttagagctagaaatagcaagttaaaataaggctagtccgttatcaacttgaaaaagtggcaccgagtcggtgcgagatgcctctcgctccgtgggcttagctgtgctcgcgc

SEQ ID NO: 1086 - RNA, 137 nt, synthetic construct
  misc_feature 1..137: note = Synthetic
  source 1..137: mol_type = other RNA
gagtagcgcgagcacagctagttttagagctagaaatagcaagttaaaataaggctagtccgttatcaacttgaaaaagtggcaccgagtcggtgcccgagatgcctctcgctccgtgggcttagctgtgctcgcgc

SEQ ID NO: 1087 - RNA, 139 nt, synthetic construct
  misc_feature 1..139: note = Synthetic
  source 1..139: mol_type = other RNA
gagtagcgcgagcacagctagttttagagctagaaatagcaagttaaaataaggctagtccgttatcaacttgaaaaagtggcaccgagtcggtgcggccgagatgcctctcgctccgtgggcttagctgtgctcgcgc

SEQ ID NO: 1088 - RNA, 113 nt, synthetic construct
  misc_feature 1..113: note = Synthetic
  source 1..113: mol_type = other RNA
gagtagcgcgagcacagctagttttagagctagaaatagcaagttaaaataaggctagtccgttatcaacttgaaaaagtggcaccgagtcggtgccttataaggctgtgctc

SEQ ID NO: 1089 - RNA, 115 nt, synthetic construct
  misc_feature 1..115: note = Synthetic
  source 1..115: mol_type = other RNA
gagtagcgcgagcacagctagttttagagctagaaatagcaagttaaaataaggctagtccgttatcaacttgaaaaagtggcaccgagtcggtgcgccttataaggctgtgctc

SEQ ID NO: 1090 - RNA, 117 nt, synthetic construct
  misc_feature 1..117: note = Synthetic
  source 1..117: mol_type = other RNA
gagtagcgcgagcacagctagttttagagctagaaatagcaagttaaaataaggctagtccgttatcaacttgaaaaagtggcaccgagtcggtgctggccttataaggctgtgctc

SEQ ID NO: 1091 - RNA, 119 nt, synthetic construct
  misc_feature 1..119: note = Synthetic
  source 1..119: mol_type = other RNA
gagtagcgcgagcacagctagttttagagctagaaatagcaagttaaaataaggctagtccgttatcaacttgaaaaagtggcaccgagtcggtgccgtggccttataaggctgtgctc

SEQ ID NO: 1092 - RNA, 115 nt, synthetic construct
  misc_feature 1..115: note = Synthetic
  source 1..115: mol_type = other RNA
gagtagcgcgagcacagctagttttagagctagaaatagcaagttaaaataaggctagtccgttatcaacttgaaaaagtggcaccgagtcggtgccttataaggctgtgctcgc

SEQ ID NO: 1093 - RNA, 117 nt, synthetic construct
  misc_feature 1..117: note = Synthetic
  source 1..117: mol_type = other RNA
gagtagcgcgagcacagctagttttagagctagaaatagcaagttaaaataaggctagtccgttatcaacttgaaaaagtggcaccgagtcggtgcgccttataaggctgtgctcgc

SEQ ID NO: 1094 - RNA, 119 nt, synthetic construct
  misc_feature 1..119: note = Synthetic
  source 1..119: mol_type = other RNA
gagtagcgcgagcacagctagttttagagctagaaatagcaagttaaaataaggctagtccgttatcaacttgaaaaagtggcaccgagtcggtgctggccttataaggctgtgctcgc

SEQ ID NO: 1095 - RNA, 121 nt, synthetic construct
  misc_feature 1..121: note = Synthetic
  source 1..121: mol_type = other RNA
gagtagcgcgagcacagctagttttagagctagaaatagcaagttaaaataaggctagtccgttatcaacttgaaaaagtggcaccgagtcggtgccgtggccttataaggctgtgctcgc

SEQ ID NO: 1096 - RNA, 117 nt, synthetic construct
  misc_feature 1..117: note = Synthetic
  source 1..117: mol_type = other RNA
gagtagcgcgagcacagctagttttagagctagaaatagcaagttaaaataaggctagtccgttatcaacttgaaaaagtggcaccgagtcggtgccttataaggctgtgctcgcgc

SEQ ID NO: 1097 - RNA, 119 nt, synthetic construct
  misc_feature 1..119: note = Synthetic
  source 1..119: mol_type = other RNA
gagtagcgcgagcacagctagttttagagctagaaatagcaagttaaaataaggctagtccgttatcaacttgaaaaagtggcaccgagtcggtgcgccttataaggctgtgctcgcgc

SEQ ID NO: 1098 - RNA, 121 nt, synthetic construct
  misc_feature 1..121: note = Synthetic
  source 1..121: mol_type = other RNA
gagtagcgcgagcacagctagttttagagctagaaatagcaagttaaaataaggctagtccgttatcaacttgaaaaagtggcaccgagtcggtgctggccttataaggctgtgctcgcgc

SEQ ID NO: 1099 - RNA, 123 nt, synthetic construct
  misc_feature 1..123: note = Synthetic
  source 1..123: mol_type = other RNA
gagtagcgcgagcacagctagttttagagctagaaatagcaagttaaaataaggctagtccgttatcaacttgaaaaagtggcaccgagtcggtgccgtggccttataaggctgtgctcgcgc

SEQ ID NO: 1100 - RNA, 131 nt, synthetic construct
  misc_feature 1..131: note = Synthetic
  source 1..131: mol_type = other RNA
gagtagcgcgagcacagctagttttagagctagaaatagcaagttaaaataaggctagtccgttatcaacttgaaaaagtggcaccgagtcggtgcgatgtaagtctcgctccgtgggcttagctgtgctc

SEQ ID NO: 1101 - RNA, 133 nt, synthetic construct
  misc_feature 1..133: note = Synthetic
  source 1..133: mol_type = other RNA
gagtagcgcgagcacagctagttttagagctagaaatagcaagttaaaataaggctagtccgttatcaacttgaaaaagtggcaccgagtcggtgcgagatgtaagtctcgctccgtgggcttagctgtgctc

SEQ ID NO: 1102 - RNA, 135 nt, synthetic construct
  misc_feature 1..135: note = Synthetic
  source 1..135: mol_type = other RNA
gagtagcgcgagcacagctagttttagagctagaaatagcaagttaaaataaggctagtccgttatcaacttgaaaaagtggcaccgagtcggtgcccgagatgtaagtctcgctccgtgggcttagctgtgctc

SEQ ID NO: 1103 - RNA, 137 nt, synthetic construct
  misc_feature 1..137: note = Synthetic
  source 1..137: mol_type = other RNA
gagtagcgcgagcacagctagttttagagctagaaatagcaagttaaaataaggctagtccgttatcaacttgaaaaagtggcaccgagtcggtgcggccgagatgtaagtctcgctccgtgggcttagctgtgctc

SEQ ID NO: 1104 - RNA, 133 nt, synthetic construct
  misc_feature 1..133: note = Synthetic
  source 1..133: mol_type = other RNA
gagtagcgcgagcacagctagttttagagctagaaatagcaagttaaaataaggctagtccgttatcaacttgaaaaagtggcaccgagtcggtgcgatgtaagtctcgctccgtgggcttagctgtgctcgc

SEQ ID NO: 1105 - RNA, 135 nt, synthetic construct
  misc_feature 1..135: note = Synthetic
  source 1..135: mol_type = other RNA
gagtagcgcgagcacagctagttttagagctagaaatagcaagttaaaataaggctagtccgttatcaacttgaaaaagtggcaccgagtcggtgcgagatgtaagtctcgctccgtgggcttagctgtgctcgc

SEQ ID NO: 1106 - RNA, 137 nt, synthetic construct
  misc_feature 1..137: note = Synthetic
  source 1..137: mol_type = other RNA
gagtagcgcgagcacagctagttttagagctagaaatagcaagttaaaataaggctagtccgttatcaacttgaaaaagtggcaccgagtcggtgcccgagatgtaagtctcgctccgtgggcttagctgtgctcgc

SEQ ID NO: 1107 - RNA, 139 nt, synthetic construct
  misc_feature 1..139: note = Synthetic
  source 1..139: mol_type = other RNA
gagtagcgcgagcacagctagttttagagctagaaatagcaagttaaaataaggctagtccgttatcaacttgaaaaagtggcaccgagtcggtgcggccgagatgtaagtctcgctccgtgggcttagctgtgctcgc

SEQ ID NO: 1108 - RNA, 135 nt, synthetic construct
  misc_feature 1..135: note = Synthetic
  source 1..135: mol_type = other RNA
gagtagcgcgagcacagctagttttagagctagaaatagcaagttaaaataaggctagtccgttatcaacttgaaaaagtggcaccgagtcggtgcgatgtaagtctcgctccgtgggcttagctgtgctcgcgc

SEQ ID NO: 1109 - RNA, 137 nt, synthetic construct
  misc_feature 1..137: note = Synthetic
  source 1..137: mol_type = other RNA
gagtagcgcgagcacagctagttttagagctagaaatagcaagttaaaataaggctagtccgttatcaacttgaaaaagtggcaccgagtcggtgcgagatgtaagtctcgctccgtgggcttagctgtgctcgcgc

SEQ ID NO: 1110 - RNA, 139 nt, synthetic construct
  misc_feature 1..139: note = Synthetic
  source 1..139: mol_type = other RNA
gagtagcgcgagcacagctagttttagagctagaaatagcaagttaaaataaggctagtccgttatcaacttgaaaaagtggcaccgagtcggtgcccgagatgtaagtctcgctccgtgggcttagctgtgctcgcgc

SEQ ID NO: 1111 - RNA, 141 nt, synthetic construct
  misc_feature 1..141: note = Synthetic
  source 1..141: mol_type = other RNA
gagtagcgcgagcacagctagttttagagctagaaatagcaagttaaaataaggctagtccgttatcaacttgaaaaagtggcaccgagtcggtgcggccgagatgtaagtctcgctccgtgggcttagctgtgctcgcgc

SEQ ID NO: 1112 - RNA, 115 nt, synthetic construct
  misc_feature 1..115: note = Synthetic
  source 1..115: mol_type = other RNA
gagtagcgcgagcacagctagttttagagctagaaatagcaagttaaaataaggctagtccgttatcaacttgaaaaagtggcaccgagtcggtgccttataataagctgtgctc

SEQ ID NO: 1113 - RNA, 117 nt, synthetic construct
  misc_feature 1..117: note = Synthetic
  source 1..117: mol_type = other RNA
gagtagcgcgagcacagctagttttagagctagaaatagcaagttaaaataaggctagtccgttatcaacttgaaaaagtggcaccgagtcggtgcgccttataataagctgtgctc

SEQ ID NO: 1114 - RNA, 119 nt, synthetic construct
  misc_feature 1..119: note = Synthetic
  source 1..119: mol_type = other RNA
gagtagcgcgagcacagctagttttagagctagaaatagcaagttaaaataaggctagtccgttatcaacttgaaaaagtggcaccgagtcggtgctggccttataataagctgtgctc

SEQ ID NO: 1115 - RNA, 121 nt, synthetic construct
  misc_feature 1..121: note = Synthetic
  source 1..121: mol_type = other RNA
gagtagcgcgagcacagctagttttagagctagaaatagcaagttaaaataaggctagtccgttatcaacttgaaaaagtggcaccgagtcggtgccgtggccttataataagctgtgctc

SEQ ID NO: 1116 - RNA, 117 nt, synthetic construct
  misc_feature 1..117: note = Synthetic
  source 1..117: mol_type = other RNA
gagtagcgcgagcacagctagttttagagctagaaatagcaagttaaaataaggctagtccgttatcaacttgaaaaagtggcaccgagtcggtgccttataataagctgtgctcgc

SEQ ID NO: 1117 - RNA, 119 nt, synthetic construct
  misc_feature 1..119: note = Synthetic
  source 1..119: mol_type = other RNA
gagtagcgcgagcacagctagttttagagctagaaatagcaagttaaaataaggctagtccgttatcaacttgaaaaagtggcaccgagtcggtgcgccttataataagctgtgctcgc

SEQ ID NO: 1118 - RNA, 121 nt, synthetic construct
  misc_feature 1..121: note = Synthetic
  source 1..121: mol_type = other RNA
gagtagcgcgagcacagctagttttagagctagaaatagcaagttaaaataaggctagtccgttatcaacttgaaaaagtggcaccgagtcggtgctggccttataataagctgtgctcgc

SEQ ID NO: 1119 - RNA, 123 nt, synthetic construct
  misc_feature 1..123: note = Synthetic
  source 1..123: mol_type = other RNA
gagtagcgcgagcacagctagttttagagctagaaatagcaagttaaaataaggctagtccgttatcaacttgaaaaagtggcaccgagtcggtgccgtggccttataataagctgtgctcgc

SEQ ID NO: 1120 - RNA, 119 nt, synthetic construct
  misc_feature 1..119: note = Synthetic
  source 1..119: mol_type = other RNA
gagtagcgcgagcacagctagttttagagctagaaatagcaagttaaaataaggctagtccgttatcaacttgaaaaagtggcaccgagtcggtgccttataataagctgtgctcgcgc

SEQ ID NO: 1121 - RNA, 121 nt, synthetic construct
  misc_feature 1..121: note = Synthetic
  source 1..121: mol_type = other RNA
gagtagcgcgagcacagctagttttagagctagaaatagcaagttaaaataaggctagtccgttatcaacttgaaaaagtggcaccgagtcggtgcgccttataataagctgtgctcgcgc

SEQ ID NO: 1122 - RNA, 123 nt, synthetic construct
  misc_feature 1..123: note = Synthetic
  source 1..123: mol_type = other RNA
gagtagcgcgagcacagctagttttagagctagaaatagcaagttaaaataaggctagtccgttatcaacttgaaaaagtggcaccgagtcggtgctggccttataataagctgtgctcgcgc

SEQ ID NO: 1123 - RNA, 125 nt, synthetic construct
  misc_feature 1..125: note = Synthetic
  source 1..125: mol_type = other RNA
gagtagcgcgagcacagctagttttagagctagaaatagcaagttaaaataaggctagtccgttatcaacttgaaaaagtggcaccgagtcggtgccgtggccttataataagctgtgctcgcgc

SEQ ID NO: 1124 - RNA, 133 nt, synthetic construct
  misc_feature 1..133: note = Synthetic
  source 1..133: mol_type = other RNA
gagtagcgcgagcacagctagttttagagctagaaatagcaagttaaaataaggctagtccgttatcaacttgaaaaagtggcaccgagtcggtgcgatgtaataatctcgctccgtgggcttagctgtgctc

SEQ ID NO: 1125 - RNA, 135 nt, synthetic construct
  misc_feature 1..135: note = Synthetic
  source 1..135: mol_type = other RNA
gagtagcgcgagcacagctagttttagagctagaaatagcaagttaaaataaggctagtccgttatcaacttgaaaaagtggcaccgagtcggtgcgagatgtaataatctcgctccgtgggcttagctgtgctc

SEQ ID NO: 1126 - RNA, 137 nt, synthetic construct
  misc_feature 1..137: note = Synthetic
  source 1..137: mol_type = other RNA
gagtagcgcgagcacagctagttttagagctagaaatagcaagttaaaataaggctagtccgttatcaacttgaaaaagtggcaccgagtcggtgcccgagatgtaataatctcgctccgtgggcttagctgtgctc

SEQ ID NO: 1127 - RNA, 139 nt, synthetic construct
  misc_feature 1..139: note = Synthetic
  source 1..139: mol_type = other RNA
gagtagcgcgagcacagctagttttagagctagaaatagcaagttaaaataaggctagtccgttatcaacttgaaaaagtggcaccgagtcggtgcggccgagatgtaataatctcgctccgtgggcttagctgtgctc

SEQ ID NO: 1128 - RNA, 135 nt, synthetic construct
  misc_feature 1..135: note = Synthetic
  source 1..135: mol_type = other RNA
gagtagcgcgagcacagctagttttagagctagaaatagcaagttaaaataaggctagtccgttatcaacttgaaaaagtggcaccgagtcggtgcgatgtaataatctcgctccgtgggcttagctgtgctcgc

SEQ ID NO: 1129 - RNA, 137 nt, synthetic construct
  misc_feature 1..137: note = Synthetic
  source 1..137: mol_type = other RNA
gagtagcgcgagcacagctagttttagagctagaaatagcaagttaaaataaggctagtccgttatcaacttgaaaaagtggcaccgagtcggtgcgagatgtaataatctcgctccgtgggcttagctgtgctcgc

SEQ ID NO: 1130 - RNA, 139 nt, synthetic construct
  misc_feature 1..139: note = Synthetic
  source 1..139: mol_type = other RNA
gagtagcgcgagcacagctagttttagagctagaaatagcaagttaaaataaggctagtccgttatcaacttgaaaaagtggcaccgagtcggtgcccgagatgtaataatctcgctccgtgggcttagctgtgctcgc

SEQ ID NO: 1131 - RNA, 141 nt, synthetic construct
  misc_feature 1..141: note = Synthetic
  source 1..141: mol_type = other RNA
gagtagcgcgagcacagctagttttagagctagaaatagcaagttaaaataaggctagtccgttatcaacttgaaaaagtggcaccgagtcggtgcggccgagatgtaataatctcgctccgtgggcttagctgtgctcgc

SEQ ID NO: 1132 - RNA, 137 nt, synthetic construct
  misc_feature 1..137: note = Synthetic
  source 1..137: mol_type = other RNA
gagtagcgcgagcacagctagttttagagctagaaatagcaagttaaaataaggctagtccgttatcaacttgaaaaagtggcaccgagtcggtgcgatgtaataatctcgctccgtgggcttagctgtgctcgcgc

SEQ ID NO: 1133 - RNA, 139 nt, synthetic construct
  misc_feature 1..139: note = Synthetic
  source 1..139: mol_type = other RNA
gagtagcgcgagcacagctagttttagagctagaaatagcaagttaaaataaggctagtccgttatcaacttgaaaaagtggcaccgagtcggtgcgagatgtaataatctcgctccgtgggcttagctgtgctcgcgc

SEQ ID NO: 1134 - RNA, 141 nt, synthetic construct
  misc_feature 1..141: note = Synthetic
  source 1..141: mol_type = other RNA
gagtagcgcgagcacagctagttttagagctagaaatagcaagttaaaataaggctagtccgttatcaacttgaaaaagtggcaccgagtcggtgcccgagatgtaataatctcgctccgtgggcttagctgtgctcgcgc

SEQ ID NO: 1135 - RNA, 143 nt, synthetic construct
  misc_feature 1..143: note = Synthetic
  source 1..143: mol_type = other RNA
gagtagcgcgagcacagctagttttagagctagaaatagcaagttaaaataaggctagtccgttatcaacttgaaaaagtggcaccgagtcggtgcggccgagatgtaataatctcgctccgtgggcttagctgtgctcgcgc

SEQ ID NO: 1136 - RNA, 127 nt, synthetic construct
  misc_feature 1..127: note = Synthetic
  source 1..127: mol_type = other RNA
gagtagcgcgagcacagctagttttagagctagaaatagcaagttaaaataaggctagtccgttatcaacttgaaaaagtggcaccgagtcggtgcgatgtaatgatccgtgggcttagctgtgctc

SEQ ID NO: 1137 - RNA, 129 nt, synthetic construct
  misc_feature 1..129: note = Synthetic
  source 1..129: mol_type = other RNA
gagtagcgcgagcacagctagttttagagctagaaatagcaagttaaaataaggctagtccgttatcaacttgaaaaagtggcaccgagtcggtgcgagatgtaatgatccgtgggcttagctgtgctc

SEQ ID NO: 1138 - RNA, 131 nt, synthetic construct
  misc_feature 1..131: note = Synthetic
  source 1..131: mol_type = other RNA
gagtagcgcgagcacagctagttttagagctagaaatagcaagttaaaataaggctagtccgttatcaacttgaaaaagtggcaccgagtcggtgcccgagatgtaatgatccgtgggcttagctgtgctc

SEQ ID NO: 1139 - RNA, 133 nt, synthetic construct
  misc_feature 1..133: note = Synthetic
  source 1..133: mol_type = other RNA
gagtagcgcgagcacagctagttttagagctagaaatagcaagttaaaataaggctagtccgttatcaacttgaaaaagtggcaccgagtcggtgcggccgagatgtaatgatccgtgggcttagctgtgctc

SEQ ID NO: 1140 - RNA, 129 nt, synthetic construct
  misc_feature 1..129: note = Synthetic
  source 1..129: mol_type = other RNA
gagtagcgcgagcacagctagttttagagctagaaatagcaagttaaaataaggctagtccgttatcaacttgaaaaagtggcaccgagtcggtgcgatgtaatgatccgtgggcttagctgtgctcgc

SEQ ID NO: 1141 - RNA, 131 nt, synthetic construct
  misc_feature 1..131: note = Synthetic
  source 1..131: mol_type = other RNA
gagtagcgcgagcacagctagttttagagctagaaatagcaagttaaaataaggctagtccgttatcaacttgaaaaagtggcaccgagtcggtgcgagatgtaatgatccgtgggcttagctgtgctcgc

SEQ ID NO: 1142 - RNA, 133 nt, synthetic construct
  misc_feature 1..133: note = Synthetic
  source 1..133: mol_type = other RNA
gagtagcgcgagcacagctagttttagagctagaaatagcaagttaaaataaggctagtccgttatcaacttgaaaaagtggcaccgagtcggtgcccgagatgtaatgatccgtgggcttagctgtgctcgc

SEQ ID NO: 1143 - RNA, 135 nt, synthetic construct
  misc_feature 1..135: note = Synthetic
  source 1..135: mol_type = other RNA
gagtagcgcgagcacagctagttttagagctagaaatagcaagttaaaataaggctagtccgttatcaacttgaaaaagtggcaccgagtcggtgcggccgagatgtaatgatccgtgggcttagctgtgctcgc

SEQ ID NO: 1144 - RNA, 131 nt, synthetic construct
  misc_feature 1..131: note = Synthetic
  source 1..131: mol_type = other RNA
gagtagcgcgagcacagctagttttagagctagaaatagcaagttaaaataaggctagtccgttatcaacttgaaaaagtggcaccgagtcggtgcgatgtaatgatccgtgggcttagctgtgctcgcgc

SEQ ID NO: 1145 - RNA, 133 nt, synthetic construct
  misc_feature 1..133: note = Synthetic
  source 1..133: mol_type = other RNA
gagtagcgcgagcacagctagttttagagctagaaatagcaagttaaaataaggctagtccgttatcaacttgaaaaagtggcaccgagtcggtgcgagatgtaatgatccgtgggcttagctgtgctcgcgc

SEQ ID NO: 1146 - RNA, 135 nt, synthetic construct
  misc_feature 1..135: note = Synthetic
  source 1..135: mol_type = other RNA
gagtagcgcgagcacagctagttttagagctagaaatagcaagttaaaataaggctagtccgttatcaacttgaaaaagtggcaccgagtcggtgcccgagatgtaatgatccgtgggcttagctgtgctcgcgc

SEQ ID NO: 1147 - RNA, 137 nt, synthetic construct
  misc_feature 1..137: note = Synthetic
  source 1..137: mol_type = other RNA
gagtagcgcgagcacagctagttttagagctagaaatagcaagttaaaataaggctagtccgttatcaacttgaaaaagtggcaccgagtcggtgcggccgagatgtaatgatccgtgggcttagctgtgctcgcgc

SEQ ID NO: 1148 - RNA, 116 nt, synthetic construct
  misc_feature 1..116: note = Synthetic
  source 1..116: mol_type = other RNA
gagtagcgcgagcacagctagttttagagctagaaatagcaagttaaaataaggctagtccgttatcaacttgaaaaagtggcaccgagtcggtgcccttataataagctgtgctc

SEQ ID NO: 1149 - RNA, 120 nt, synthetic construct
  misc_feature 1..120: note = Synthetic
  source 1..120: mol_type = other RNA
gagtagcgcgagcacagctagttttagagctagaaatagcaagttaaaataaggctagtccgttatcaacttgaaaaagtggcaccgagtcggtgcgtggccttataataagctgtgctc

SEQ ID NO: 1150 - RNA, 118 nt, synthetic construct
  misc_feature 1..118: note = Synthetic
  source 1..118: mol_type = other RNA
gagtagcgcgagcacagctagttttagagctagaaatagcaagttaaaataaggctagtccgttatcaacttgaaaaagtggcaccgagtcggtgcccttataataagctgtgctcgc

SEQ ID NO: 1151 - RNA, 123 nt, synthetic construct
  misc_feature 1..123: note = Synthetic
  source 1..123: mol_type = other RNA
gagtagcgcgagcacagctagttttagagctagaaatagcaagttaaaataaggctagtccgttatcaacttgaaaaagtggcaccgagtcggtgctccgtggccttataataagctgtgctc

SEQ ID NO: 1152 - RNA, 20 nt, synthetic construct
  misc_feature 1..20: note = Synthetic
  source 1..20: mol_type = other RNA
ggccgagatgtctcgctccg

SEQ ID NO: 1153 - RNA, 20 nt, synthetic construct
  misc_feature 1..20: note = Synthetic
  source 1..20: mol_type = other RNA
ccgagatgcctctcgctccg

SEQ ID NO: 1154 - RNA, 20 nt, synthetic construct
  misc_feature 1..20: note = Synthetic
  source 1..20: mol_type = other RNA
gagatgtaagtctcgctccg

SEQ ID NO: 1155 - RNA, 20 nt, synthetic construct
  misc_feature 1..20: note = Synthetic
  source 1..20: mol_type = other RNA
gatgtaataatctcgctccg

SEQ ID NO: 1156 - RNA, 20 nt, synthetic construct
  misc_feature 1..20: note = Synthetic
  source 1..20: mol_type = other RNA
ggccgagatgtaatgatccg

SEQ ID NO: 1157 - RNA, 95 nt, synthetic construct; identical to SEQ ID NO: 1025
  misc_feature 1..95: note = Synthetic
  source 1..95: mol_type = other RNA

SEQ ID NO: 1158 - RNA, 95 nt, synthetic construct
  misc_feature 1..95: note = Synthetic
  source 1..95: mol_type = other RNA
ccgagatgcctctcgctccggttttagagctagaaatagcaagttaaaataaggctagtccgttatcaacttgaaaaagtggcaccgagtcggtg

SEQ ID NO: 1159 - RNA, 95 nt, synthetic construct
  misc_feature 1..95: note = Synthetic
  source 1..95: mol_type = other RNA
gagatgtaagtctcgctccggttttagagctagaaatagcaagttaaaataaggctagtccgttatcaacttgaaaaagtggcaccgagtcggtg

SEQ ID NO: 1160 - RNA, 95 nt, synthetic construct
  misc_feature 1..95: note = Synthetic
  source 1..95: mol_type = other RNA
gatgtaataatctcgctccggttttagagctagaaatagcaagttaaaataaggctagtccgttatcaacttgaaaaagtggcaccgagtcggtg

SEQ ID NO: 1161 - RNA, 95 nt, synthetic construct
  misc_feature 1..95: note = Synthetic
  source 1..95: mol_type = other RNA
ggccgagatgtaatgatccggttttagagctagaaatagcaagttaaaataaggctagtccgttatcaacttgaaaaagtggcaccgagtcggtg

SEQ ID NO: 1162-1163 - skipped (2 entries)

SEQ ID NO: 1164 - RNA, 11 nt, synthetic construct
  misc_feature 1..11: note = Synthetic
  source 1..11: mol_type = other RNA
gctccgtgccg

SEQ ID NO: 1165 - RNA, 13 nt, synthetic construct
  misc_feature 1..13: note = Synthetic
  source 1..13: mol_type = other RNA
tcgctccgtgccg

SEQ ID NO: 1166 - RNA, 19 nt, synthetic construct
  misc_feature 1..19: note = Synthetic
  source 1..19: mol_type = other RNA
gatgcctctcgctgcgtgg

SEQ ID NO: 1167 - RNA, 21 nt, synthetic construct
  misc_feature 1..21: note = Synthetic
  source 1..21: mol_type = other RNA
gagatgcctctcgctgcgtgg

SEQ ID NO: 1168 - RNA, 23 nt, synthetic construct
  misc_feature 1..23: note = Synthetic
  source 1..23: mol_type = other RNA
ccgagatgcctctcgctgcgtgg

SEQ ID NO: 1169 - RNA, 25 nt, synthetic construct
  misc_feature 1..25: note = Synthetic
  source 1..25: mol_type = other RNA
ggccgagatgcctctcgctgcgtgg

SEQ ID NO: 1170 - skipped

SEQ ID NO: 1171 - RNA, 11 nt, synthetic construct
  misc_feature 1..11: note = Synthetic
  source 1..11: mol_type = other RNA
tccgtgtaagg

SEQ ID NO: 1172 - RNA, 13 nt, synthetic construct
  misc_feature 1..13: note = Synthetic
  source 1..13: mol_type = other RNA
gctccgtgtaagg

SEQ ID NO: 1173 - RNA, 15 nt, synthetic construct
  misc_feature 1..15: note = Synthetic
  source 1..15: mol_type = other RNA
tcgctccgtgtaagg

SEQ ID NO: 1174 - RNA, 21 nt, synthetic construct
  misc_feature 1..21: note = Synthetic
  source 1..21: mol_type = other RNA
gatgtaagtctcgctgcgtgg

SEQ ID NO: 1175 - RNA, 23 nt, synthetic construct
  misc_feature 1..23: note = Synthetic
  source 1..23: mol_type = other RNA
gagatgtaagtctcgctgcgtgg

SEQ ID NO: 1176 - RNA, 25 nt, synthetic construct
  misc_feature 1..25: note = Synthetic
  source 1..25: mol_type = other RNA
ccgagatgtaagtctcgctgcgtgg

SEQ ID NO: 1177 - RNA, 27 nt, synthetic construct
  misc_feature 1..27: note = Synthetic
  source 1..27: mol_type = other RNA
ggccgagatgtaagtctcgctgcgtgg

SEQ ID NO: 1178 - RNA, 11 nt, synthetic construct
  misc_feature 1..11: note = Synthetic
  source 1..11: mol_type = other RNA
cgtgtaataag

SEQ ID NO: 1179 - RNA, 13 nt, synthetic construct
  misc_feature 1..13: note = Synthetic
  source 1..13: mol_type = other RNA
tccgtgtaataag

SEQ ID NO: 1180 - RNA, 15 nt, synthetic construct
  misc_feature 1..15: note = Synthetic
  source 1..15: mol_type = other RNA
gctccgtgtaataag

SEQ ID NO: 1181 - RNA, 17 nt, synthetic construct
  misc_feature 1..17: note = Synthetic
  source 1..17: mol_type = other RNA
tcgctccgtgtaataag

SEQ ID NO: 1182 - RNA, 23 nt, synthetic construct
  misc_feature 1..23: note = Synthetic
  source 1..23: mol_type = other RNA
gatgtaataatctcgctgcgtgg

SEQ ID NO: 1183 - RNA, 25 nt, synthetic construct
  misc_feature 1..25: note = Synthetic
  source 1..25: mol_type = other RNA
gagatgtaataatctcgctgcgtgg

SEQ ID NO: 1184 - RNA, 27 nt, synthetic construct
  misc_feature 1..27: note = Synthetic
  source 1..27: mol_type = other RNA
ccgagatgtaataatctcgctgcgtgg

SEQ ID NO: 1185 - RNA, 29 nt, synthetic construct
  misc_feature 1..29: note = Synthetic
  source 1..29: mol_type = other RNA
ggccgagatgtaataatctcgctgcgtgg

SEQ ID NO: 1186 - RNA, 17 nt, synthetic construct
  misc_feature 1..17: note = Synthetic
  source 1..17: mol_type = other RNA
gatgtaatgatgcgtgg

SEQ ID NO: 1187 - RNA, 19 nt, synthetic construct
  misc_feature 1..19: note = Synthetic
  source 1..19: mol_type = other RNA
gagatgtaatgatgcgtgg

SEQ ID NO: 1188 - RNA, 21 nt, synthetic construct
  misc_feature 1..21: note = Synthetic
  source 1..21: mol_type = other RNA
ccgagatgtaatgatgcgtgg

SEQ ID NO: 1189 - RNA, 23 nt, synthetic construct
  misc_feature 1..23: note = Synthetic
  source 1..23: mol_type = other RNA
ggccgagatgtaatgatgcgtgg

SEQ ID NO: 1190 - RNA, 16 nt, synthetic construct
  misc_feature 1..16: note = Synthetic
  source 1..16: mol_type = other RNA
atgtaatgatgcgtgg

SEQ ID NO: 1191 - RNA, 12 nt, synthetic construct
  misc_feature 1..12: note = Synthetic
  source 1..12: mol_type = other RNA
ccgtgtaataag

SEQ ID NO: 1192 - RNA, 111 nt, synthetic construct
  misc_feature 1..111: note = Synthetic
  source 1..111: mol_type = other RNA
cgcgagcacagctaaggccagttttagagctagaaatagcaagttaaaataaggctagtccgttatcaacttgaaaaagtggcaccgagtcggtgccgtgccgccttagct

SEQ ID NO: 1193 - RNA, 113 nt, synthetic construct
  misc_feature 1..113: note = Synthetic
  source 1..113: mol_type = other RNA
cgcgagcacagctaaggccagttttagagctagaaatagcaagttaaaataaggctagtccgttatcaacttgaaaaagtggcaccgagtcggtgctccgtgccgccttagct

SEQ ID NO: 1194 - RNA, 115 nt, synthetic construct
  misc_feature 1..115: note = Synthetic
  source 1..115: mol_type = other RNA
cgcgagcacagctaaggccagttttagagctagaaatagcaagttaaaataaggctagtccgttatcaacttgaaaaagtggcaccgagtcggtgcgctccgtgccgccttagct

SEQ ID NO: 1195 - RNA, 117 nt, synthetic construct
  misc_feature 1..117: note = Synthetic
  source 1..117: mol_type = other RNA
cgcgagcacagctaaggccagttttagagctagaaatagcaagttaaaataaggctagtccgttatcaacttgaaaaagtggcaccgagtcggtgctcgctccgtgccgccttagct

SEQ ID NO: 1196 - RNA, 113 nt, synthetic construct
  misc_feature 1..113: note = Synthetic
  source 1..113: mol_type = other RNA
cgcgagcacagctaaggccagttttagagctagaaatagcaagttaaaataaggctagtccgttatcaacttgaaaaagtggcaccgagtcggtgccgtgccgccttagctgt

SEQ ID NO: 1197 - RNA, 115 nt, synthetic construct
  misc_feature 1..115: note = Synthetic
  source 1..115: mol_type = other RNA
cgcgagcacagctaaggccagttttagagctagaaatagcaagttaaaataaggctagtccgttatcaacttgaaaaagtggcaccgagtcggtgctccgtgccgccttagctgt

SEQ ID NO: 1198 - RNA, 117 nt, synthetic construct
  misc_feature 1..117: note = Synthetic
  source 1..117: mol_type = other RNA
cgcgagcacagctaaggccagttttagagctagaaatagcaagttaaaataaggctagtccgttatcaacttgaaaaagtggcaccgagtcggtgcgctccgtgccgccttagctgt

SEQ ID NO: 1199 - RNA, 119 nt, synthetic construct
  misc_feature 1..119: note = Synthetic
  source 1..119: mol_type = other RNA
cgcgagcacagctaaggccagttttagagctagaaatagcaagttaaaataaggctagtccgttatcaacttgaaaaagtggcaccgagtcggtgctcgctccgtgccgccttagctgt

SEQ ID NO: 1200 - RNA, 115 nt, synthetic construct
  misc_feature 1..115: note = Synthetic
  source 1..115: mol_type = other RNA
cgcgagcacagctaaggccagttttagagctagaaatagcaagttaaaataaggctagtccgttatcaacttgaaaaagtggcaccgagtcggtgccgtgccgccttagctgtgc

SEQ ID NO: 1201 - RNA, 117 nt, synthetic construct
  misc_feature 1..117: note = Synthetic
  source 1..117: mol_type = other RNA
cgcgagcacagctaaggccagttttagagctagaaatagcaagttaaaataaggctagtccgttatcaacttgaaaaagtggcaccgagtcggtgctccgtgccgccttagctgtgc

SEQ ID NO: 1202 - RNA, 119 nt, synthetic construct
  misc_feature 1..119: note = Synthetic
  source 1..119: mol_type = other RNA
cgcgagcacagctaaggccagttttagagctagaaatagcaagttaaaataaggctagtccgttatcaacttgaaaaagtggcaccgagtcggtgcgctccgtgccgccttagctgtgc

SEQ ID NO: 1203 - RNA, 121 nt, synthetic construct
  misc_feature 1..121: note = Synthetic
  source 1..121: mol_type = other RNA
cgcgagcacagctaaggccagttttagagctagaaatagcaagttaaaataaggctagtccgttatcaacttgaaaaagtggcaccgagtcggtgctcgctccgtgccgccttagctgtgc

SEQ ID NO: 1204 - RNA, 123 nt, synthetic construct
  misc_feature 1..123: note = Synthetic
  source 1..123: mol_type = other RNA
cgcgagcacagctaaggccagttttagagctagaaatagcaagttaaaataaggctagtccgttatcaacttgaaaaagtggcaccgagtcggtgcgatgcctctcgctgcgtggccttagct

SEQ ID NO: 1205 - RNA, 125 nt, synthetic construct
  misc_feature 1..125: note = Synthetic
  source 1..125: mol_type = other RNA
cgcgagcacagctaaggccagttttagagctagaaatagcaagttaaaataaggctagtccgttatcaacttgaaaaagtggcaccgagtcggtgcgagatgcctctcgctgcgtggccttagct

SEQ ID NO: 1206 - RNA, 127 nt, synthetic construct
  misc_feature 1..127: note = Synthetic
  source 1..127: mol_type = other RNA
cgcgagcacagctaaggccagttttagagctagaaatagcaagttaaaataaggctagtccgttatcaacttgaaaaagtggcaccgagtcggtgcccgagatgcctctcgctgcgtggccttagct

SEQ ID NO: 1207 - RNA, 129 nt, synthetic construct
  misc_feature 1..129: note = Synthetic
  source 1..129: mol_type = other RNA
cgcgagcacagctaaggccagttttagagctagaaatagcaagttaaaataaggctagtccgttatcaacttgaaaaagtggcaccgagtcggtgcggccgagatgcctctcgctgcgtggccttagct

SEQ ID NO: 1208 - RNA, 125 nt, synthetic construct
  misc_feature 1..125: note = Synthetic
  source 1..125: mol_type = other RNA
cgcgagcacagctaaggccagttttagagctagaaatagcaagttaaaataaggctagtccgttatcaacttgaaaaagtggcaccgagtcggtgcgatgcctctcgctgcgtggccttagctgt

SEQ ID NO: 1209 - RNA, 127 nt, synthetic construct
  misc_feature 1..127: note = Synthetic
  source 1..127: mol_type = other RNA
cgcgagcacagctaaggccagttttagagctagaaatagcaagttaaaataaggctagtccgttatcaacttgaaaaagtggcaccgagtcggtgcgagatgcctctcgctgcgtggccttagctgt

SEQ ID NO: 1210 - RNA, 129 nt, synthetic construct
  misc_feature 1..129: note = Synthetic
  source 1..129: mol_type = other RNA
cgcgagcacagctaaggccagttttagagctagaaatagcaagttaaaataaggctagtccgttatcaacttgaaaaagtggcaccgagtcggtgcccgagatgcctctcgctgcgtggccttagctgt

SEQ ID NO: 1211 - RNA, 131 nt, synthetic construct
  misc_feature 1..131: note = Synthetic
  source 1..131: mol_type = other RNA
cgcgagcacagctaaggccagttttagagctagaaatagcaagttaaaataaggctagtccgttatcaacttgaaaaagtggcaccgagtcggtgcggccgagatgcctctcgctgcgtggccttagctgt

SEQ ID NO: 1212 - RNA, 127 nt, synthetic construct
  misc_feature 1..127: note = Synthetic
  source 1..127: mol_type = other RNA
cgcgagcacagctaaggccagttttagagctagaaatagcaagttaaaataaggctagtccgttatcaacttgaaaaagtggcaccgagtcggtgcgatgcctctcgctgcgtggccttagctgtgc

SEQ ID NO: 1213 - RNA, 129 nt, synthetic construct
  misc_feature 1..129: note = Synthetic
  source 1..129: mol_type = other RNA
cgcgagcacagctaaggccagttttagagctagaaatagcaagttaaaataaggctagtccgttatcaacttgaaaaagtggcaccgagtcggtgcgagatgcctctcgctgcgtggccttagctgtgc

SEQ ID NO: 1214 - RNA, 131 nt, synthetic construct
  misc_feature 1..131: note = Synthetic
  source 1..131: mol_type = other RNA
cgcgagcacagctaaggccagttttagagctagaaatagcaagttaaaataaggctagtccgttatcaacttgaaaaagtggcaccgagtcggtgcccgagatgcctctcgctgcgtggccttagctgtgc

SEQ ID NO: 1215 - RNA, 133 nt, synthetic construct
  misc_feature 1..133: note = Synthetic
  source 1..133: mol_type = other RNA
cgcgagcacagctaaggccagttttagagctagaaatagcaagttaaaataaggctagtccgttatcaacttgaaaaagtggcaccgagtcggtgcggccgagatgcctctcgctgcgtggccttagctgtgc

SEQ ID NO: 1216 - RNA, 113 nt, synthetic construct
  misc_feature 1..113: note = Synthetic
  source 1..113: mol_type = other RNA
cgcgagcacagctaaggccagttttagagctagaaatagcaagttaaaataaggctagtccgttatcaacttgaaaaagtggcaccgagtcggtgccgtgtaaggccttagct

SEQ ID NO: 1217 - RNA, 115 nt, synthetic construct
  misc_feature 1..115: note = Synthetic
  source 1..115: mol_type = other RNA
cgcgagcacagctaaggccagttttagagctagaaatagcaagttaaaataaggctagtccgttatcaacttgaaaaagtggcaccgagtcggtgctccgtgtaaggccttagct

SEQ ID NO: 1218 - RNA, 117 nt, synthetic construct
  misc_feature 1..117: note = Synthetic
  source 1..117: mol_type = other RNA
cgcgagcacagctaaggccagttttagagctagaaatagcaagttaaaataaggctagtccgttatcaacttgaaaaagtggcaccgagtcggtgcgctccgtgtaaggccttagct

SEQ ID NO: 1219 - RNA, 119 nt, synthetic construct
  misc_feature 1..119: note = Synthetic
  source 1..119: mol_type = other RNA
cgcgagcacagctaaggccagttttagagctagaaatagcaagttaaaataaggctagtccgttatcaacttgaaaaagtggcaccgagtcggtgctcgctccgtgtaaggccttagct

SEQ ID NO: 1220 - RNA, 115 nt, synthetic construct
  misc_feature 1..115: note = Synthetic
  source 1..115: mol_type = other RNA
cgcgagcacagctaaggccagttttagagctagaaatagcaagttaaaataaggctagtccgttatcaacttgaaaaagtggcaccgagtcggtgccgtgtaaggccttagctgt

SEQ ID NO: 1221 - RNA, 117 nt, synthetic construct
  misc_feature 1..117: note = Synthetic
  source 1..117: mol_type = other RNA
cgcgagcacagctaaggccagttttagagctagaaatagcaagttaaaataaggctagtccgttatcaacttgaaaaagtggcaccgagtcggtgctccgtgtaaggccttagctgt

SEQ ID NO: 1222 - RNA, 119 nt, synthetic construct
  misc_feature 1..119: note = Synthetic
  source 1..119: mol_type = other RNA
cgcgagcacagctaaggccagttttagagctagaaatagcaagttaaaataaggctagtccgttatcaacttgaaaaagtggcaccgagtcggtgcgctccgtgtaaggccttagctgt

SEQ ID NO: 1223 - RNA, 121 nt, synthetic construct
  misc_feature 1..121: note = Synthetic
  source 1..121: mol_type = other RNA
cgcgagcacagctaaggccagttttagagctagaaatagcaagttaaaataaggctagtccgttatcaacttgaaaaagtggcaccgagtcggtgctcgctccgtgtaaggccttagctgt

SEQ ID NO: 1224 - RNA, 117 nt, synthetic construct
  misc_feature 1..117: note = Synthetic
  source 1..117: mol_type = other RNA
cgcgagcacagctaaggccagttttagagctagaaatagcaagttaaaataaggctagtccgttatcaacttgaaaaagtggcaccgagtcggtgccgtgtaaggccttagctgtgc

SEQ ID NO: 1225 - RNA, 119 nt, synthetic construct
  misc_feature 1..119: note = Synthetic
  source 1..119: mol_type = other RNA
cgcgagcacagctaaggccagttttagagctagaaatagcaagttaaaataaggctagtccgttatcaacttgaaaaagtggcaccgagtcggtgctccgtgtaaggccttagctgtgc

SEQ ID NO: 1226 - RNA, 121 nt, synthetic construct
  misc_feature 1..121: note = Synthetic
  source 1..121: mol_type = other RNA
cgcgagcacagctaaggccagttttagagctagaaatagcaagttaaaataaggctagtccgttatcaacttgaaaaagtggcaccgagtcggtgcgctccgtgtaaggccttagctgtgc

SEQ ID NO: 1227 - RNA, 123 nt, synthetic construct
  misc_feature 1..123: note = Synthetic
  source 1..123: mol_type = other RNA
cgcgagcacagctaaggccagttttagagctagaaatagcaagttaaaataaggctagtccgttatcaacttgaaaaagtggcaccgagtcggtgctcgctccgtgtaaggccttagctgtgc

SEQ ID NO: 1228 - RNA, 125 nt, synthetic construct
  misc_feature 1..125: note = Synthetic
  source 1..125: mol_type = other RNA
cgcgagcacagctaaggccagttttagagctagaaatagcaagttaaaataaggctagtccgttatcaacttgaaaaagtggcaccgagtcggtgcgatgtaagtctcgctgcgtggccttagct

SEQ ID NO: 1229 - RNA, 127 nt, synthetic construct
  misc_feature 1..127: note = Synthetic
  source 1..127: mol_type = other RNA
cgcgagcacagctaaggccagttttagagctagaaatagcaagttaaaataaggctagtccgttatcaacttgaaaaagtggcaccgagtcggtgcgagatgtaagtctcgctgcgtggccttagct

SEQ ID NO: 1230 - RNA, 129 nt, synthetic construct
  misc_feature 1..129: note = Synthetic
  source 1..129: mol_type = other RNA
cgcgagcacagctaaggccagttttagagctagaaatagcaagttaaaataaggctagtccgttatcaacttgaaaaagtggcaccgagtcggtgcccgagatgtaagtctcgctgcgtggccttagct

SEQ ID NO: 1231 - RNA, 131 nt, synthetic construct
  misc_feature 1..131: note = Synthetic
  source 1..131: mol_type = other RNA
cgcgagcacagctaaggccagttttagagctagaaatagcaagttaaaataaggctagtccgttatcaacttgaaaaagtggcaccgagtcggtgcggccgagatgtaagtctcgctgcgtggccttagct

SEQ ID NO: 1232 - RNA, 127 nt, synthetic construct
  misc_feature 1..127: note = Synthetic
  source 1..127: mol_type = other RNA
cgcgagcacagctaaggccagttttagagctagaaatagcaagttaaaataaggctagtccgttatcaacttgaaaaagtggcaccgagtcggtgcgatgtaagtctcgctgcgtggccttagctgt

SEQ ID NO: 1233 - RNA, 129 nt, synthetic construct
  misc_feature 1..129: note = Synthetic
  source 1..129: mol_type = other RNA
cgcgagcacagctaaggccagttttagagctagaaatagcaagttaaaataaggctagtccgttatcaacttgaaaaagtggcaccgagtcggtgcgagatgtaagtctcgctgcgtggccttagctgt

SEQ ID NO: 1234 - RNA, 131 nt, synthetic construct
  misc_feature 1..131: note = Synthetic
  source 1..131: mol_type = other RNA
cgcgagcacagctaaggccagttttagagctagaaatagcaagttaaaataaggctagtccgttatcaacttgaaaaagtggcaccgagtcggtgcccgagatgtaagtctcgctgcgtggccttagctgt

SEQ ID NO: 1235 - RNA, 133 nt, synthetic construct
  misc_feature 1..133: note = Synthetic
  source 1..133: mol_type = other RNA
cgcgagcacagctaaggccagttttagagctagaaatagcaagttaaaataaggctagtccgttatcaacttgaaaaagtggcaccgagtcggtgcggccgagatgtaagtctcgctgcgtggccttagctgt

SEQ ID NO: 1236 - RNA, 129 nt, synthetic construct
  misc_feature 1..129: note = Synthetic
  source 1..129: mol_type = other RNA
cgcgagcacagctaaggccagttttagagctagaaatagcaagttaaaataaggctagtccgttatcaacttgaaaaagtggcaccgagtcggtgcgatgtaagtctcgctgcgtggccttagctgtgc

SEQ ID NO: 1237 - RNA, 131 nt, synthetic construct
  misc_feature 1..131: note = Synthetic
  source 1..131: mol_type = other RNA
cgcgagcacagctaaggccagttttagagctagaaatagcaagttaaaataaggctagtccgttatcaacttgaaaaagtggcaccgagtcggtgcgagatgtaagtctcgctgcgtggccttagctgtgc

SEQ ID NO: 1238 - RNA, 133 nt, synthetic construct
  misc_feature 1..133: note = Synthetic
  source 1..133: mol_type = other RNA
cgcgagcacagctaaggccagttttagagctagaaatagcaagttaaaataaggctagtccgttatcaacttgaaaaagtggcaccgagtcggtgcccgagatgtaagtctcgctgcgtggccttagctgtgc

SEQ ID NO: 1239 - RNA, 135 nt, synthetic construct
  misc_feature 1..135: note = Synthetic
  source 1..135: mol_type = other RNA
cgcgagcacagctaaggccagttttagagctagaaatagcaagttaaaataaggctagtccgttatcaacttgaaaaagtggcaccgagtcggtgcggccgagatgtaagtctcgctgcgtggccttagctgtgc

SEQ ID NO: 1240 - RNA, 115 nt, synthetic construct
  misc_feature 1..115: note = Synthetic
  source 1..115: mol_type = other RNA
cgcgagcacagctaaggccagttttagagctagaaatagcaagttaaaataaggctagtccgttatcaacttgaaaaagtggcaccgagtcggtgccgtgtaataagccttagct

SEQ ID NO: 1241 - RNA, 117 nt, synthetic construct
  misc_feature 1..117: note = Synthetic
  source 1..117: mol_type = other RNA
cgcgagcacagctaaggccagttttagagctagaaatagcaagttaaaataaggctagtccgttatcaacttgaaaaagtggcaccgagtcggtgctccgtgtaataagccttagct

SEQ ID NO: 1242 - RNA, 119 nt, synthetic construct
  misc_feature 1..119: note = Synthetic
  source 1..119: mol_type = other RNA
cgcgagcacagctaaggccagttttagagctagaaatagcaagttaaaataaggctagtccgttatcaacttgaaaaagtggcaccgagtcggtgcgctccgtgtaataagccttagct

SEQ ID NO: 1243 - RNA, 121 nt, synthetic construct
  misc_feature 1..121: note = Synthetic
  source 1..121: mol_type = other RNA
cgcgagcacagctaaggccagttttagagctagaaatagcaagttaaaataaggctagtccgttatcaacttgaaaaagtggcaccgagtcggtgctcgctccgtgtaataagccttagct

SEQ ID NO: 1244 - RNA, 117 nt, synthetic construct
  misc_feature 1..117: note = Synthetic
  source 1..117: mol_type = other RNA
cgcgagcacagctaaggccagttttagagctagaaatagcaagttaaaataaggctagtccgttatcaacttgaaaaagtggcaccgagtcggtgccgtgtaataagccttagctgt

SEQ ID NO: 1245 - RNA, 119 nt, synthetic construct
  misc_feature 1..119: note = Synthetic
  source 1..119: mol_type = other RNA
cgcgagcacagctaaggccagttttagagctagaaatagcaagttaaaataaggctagtccgttatcaacttgaaaaagtggcaccgagtcggtgctccgtgtaataagccttagctgt

SEQ ID NO: 1246 - RNA, 121 nt, synthetic construct
  misc_feature 1..121: note = Synthetic
  source 1..121: mol_type = other RNA
cgcgagcacagctaaggccagttttagagctagaaatagcaagttaaaataaggctagtccgttatcaacttgaaaaagtggcaccgagtcggtgcgctccgtgtaataagccttagctgt

SEQ ID NO: 1247 - RNA, 123 nt, synthetic construct
  misc_feature 1..123: note = Synthetic
  source 1..123: mol_type = other RNA
cgcgagcacagctaaggccagttttagagctagaaatagcaagttaaaataaggctagtccgttatcaacttgaaaaagtggcaccgagtcggtgctcgctccgtgtaataagccttagctgt

SEQ ID NO: 1248 - RNA, 119 nt, synthetic construct
  misc_feature 1..119: note = Synthetic
  source 1..119: mol_type = other RNA
cgcgagcacagctaaggccagttttagagctagaaatagcaagttaaaataaggctagtccgttatcaacttgaaaaagtggcaccgagtcggtgccgtgtaataagccttagctgtgc

SEQ ID NO: 1249 - RNA, 121 nt, synthetic construct
  misc_feature 1..121: note = Synthetic
  source 1..121: mol_type = other RNA
cgcgagcacagctaaggccagttttagagctagaaatagcaagttaaaataaggctagtccgttatcaacttgaaaaagtggcaccgagtcggtgctccgtgtaataagccttagctgtgc

SEQ ID NO: 1250 - RNA, 123 nt, synthetic construct
  misc_feature 1..123: note = Synthetic
  source 1..123: mol_type = other RNA
cgcgagcacagctaaggccagttttagagctagaaatagcaagttaaaataaggctagtccgttatcaacttgaaaaagtggcaccgagtcggtgcgctccgtgtaataagccttagctgtgc

SEQ ID NO: 1251 - RNA, 125 nt, synthetic construct
  misc_feature 1..125: note = Synthetic
  source 1..125: mol_type = other RNA
cgcgagcacagctaaggccagttttagagctagaaatagcaagttaaaataaggctagtccgttatcaacttgaaaaagtggcaccgagtcggtgctcgctccgtgtaataagccttagctgtgc

SEQ ID NO: 1252 - RNA, 127 nt, synthetic construct
  misc_feature 1..127: note = Synthetic
  source 1..127: mol_type = other RNA
cgcgagcacagctaaggccagttttagagctagaaatagcaagttaaaataaggctagtccgttatcaacttgaaaaagtggcaccgagtcggtgcgatgtaataatctcgctgcgtggccttagct

SEQ ID NO: 1253 - RNA, 129 nt, synthetic construct
  misc_feature 1..129: note = Synthetic
  source 1..129: mol_type = other RNA
cgcgagcacagctaaggccagttttagagctagaaatagcaagttaaaataaggctagtccgttatcaacttgaaaaagtggcaccgagtcggtgcgagatgtaataatctcgctgcgtggccttagct

SEQ ID NO: 1254 - RNA, 131 nt, synthetic construct
  misc_feature 1..131: note = Synthetic
  source 1..131: mol_type = other RNA
cgcgagcacagctaaggccagttttagagctagaaatagcaagttaaaataaggctagtccgttatcaacttgaaaaagtggcaccgagtcggtgcccgagatgtaataatctcgctgcgtggccttagct

SEQ ID NO: 1255 - RNA, 133 nt, synthetic construct
  misc_feature 1..133: note = Synthetic
  source 1..133: mol_type = other RNA
cgcgagcacagctaaggccagttttagagctagaaatagcaagttaaaataaggctagtccgttatcaacttgaaaaagtggcaccgagtcggtgcggccgagatgtaataatctcgctgcgtggccttagct

SEQ ID NO: 1256 - RNA, 129 nt, synthetic construct
  misc_feature 1..129: note = Synthetic
  source 1..129: mol_type = other RNA
cgcgagcacagctaaggccagttttagagctagaaatagcaagttaaaataaggctagtccgttatcaacttgaaaaagtggcaccgagtcggtgcgatgtaataatctcgctgcgtggccttagctgt

SEQ ID NO: 1257 - RNA, 131 nt, synthetic construct
  misc_feature 1..131: note = Synthetic
  source 1..131: mol_type = other RNA
cgcgagcacagctaaggccagttttagagctagaaatagcaagttaaaataaggctagtccgttatcaacttgaaaaagtggcaccgagtcggtgcgagatgtaataatctcgctgcgtggccttagctgt

SEQ ID NO: 1258 - RNA, 133 nt, synthetic construct
  misc_feature 1..133: note = Synthetic
  source 1..133: mol_type = other RNA
cgcgagcacagctaaggccagttttagagctagaaatagcaagttaaaataaggctagtccgttatcaacttgaaaaagtggcaccgagtcggtgcccgagatgtaataatctcgctgcgtggccttagctgt

SEQ ID NO: 1259 - RNA, 135 nt, synthetic construct
  misc_feature 1..135: note = Synthetic
  source 1..135: mol_type = other RNA
cgcgagcacagctaaggccagttttagagctagaaatagcaagttaaaataaggctagtccgttatcaacttgaaaaagtggcaccgagtcggtgcggccgagatgtaataatctcgctgcgtggccttagctgt

SEQ ID NO: 1260 - RNA, 131 nt, synthetic construct
  misc_feature 1..131: note = Synthetic
  source 1..131: mol_type = other RNA
cgcgagcacagctaaggccagttttagagctagaaatagcaagttaaaataaggctagtccgttatcaacttgaaaaagtggcaccgagtcggtgcgatgtaataatctcgctgcgtggccttagctgtgc

SEQ ID NO: 1261 - RNA, 133 nt, synthetic construct
  misc_feature 1..133: note = Synthetic
  source 1..133: mol_type = other RNA
cgcgagcacagctaaggccagttttagagctagaaatagcaagttaaaataaggctagtccgttatcaacttgaaaaagtggcaccgagtcggtgcgagatgtaataatctcgctgcgtggccttagctgtgc

SEQ ID NO: 1262 - RNA, 135 nt, synthetic construct
  misc_feature 1..135: note = Synthetic
  source 1..135: mol_type = other RNA
cgcgagcacagctaaggccagttttagagctagaaatagcaagttaaaataaggctagtccgttatcaacttgaaaaagtggcaccgagtcggtgcccgagatgtaataatctcgctgcgtggccttagctgtgc

SEQ ID NO: 1263 - RNA, 137 nt, synthetic construct
  misc_feature 1..137: note = Synthetic
  source 1..137: mol_type = other RNA
cgcgagcacagctaaggccagttttagagctagaaatagcaagttaaaataaggctagtccgttatcaacttgaaaaagtggcaccgagtcggtgcggccgagatgtaataatctcgctgcgtggccttagctgtgc

SEQ ID NO: 1264 - RNA, 121 nt, synthetic construct
  misc_feature 1..121: note = Synthetic
  source 1..121: mol_type = other RNA
cgcgagcacagctaaggccagttttagagctagaaatagcaagttaaaataaggctagtccgttatcaacttgaaaaagtggcaccgagtcggtgcgatgtaatgatgcgtggccttagct

SEQ ID NO: 1265 - RNA, 123 nt, synthetic construct
  misc_feature 1..123: note = Synthetic
  source 1..123: mol_type = other RNA
cgcgagcacagctaaggccagttttagagctagaaatagcaagttaaaataaggctagtccgttatcaacttgaaaaagtggcaccgagtcggtgcgagatgtaatgatgcgtggccttagct

SEQ ID NO: 1266 - RNA, 125 nt, synthetic construct
  misc_feature 1..125: note = Synthetic
  source 1..125: mol_type = other RNA
cgcgagcacagctaaggccagttttagagctagaaatagcaagttaaaataaggctagtccgttatcaacttgaaaaagtggcaccgagtcggtgcccgagatgtaatgatgcgtggccttagct

SEQ ID NO: 1267 - RNA, 127 nt, synthetic construct
  misc_feature 1..127: note = Synthetic
  source 1..127: mol_type = other RNA
cgcgagcacagctaaggccagttttagagctagaaatagcaagttaaaataaggctagtccgttatcaacttgaaaaagtggcaccgagtcggtgcggccgagatgtaatgatgcgtggccttagct

SEQ ID NO: 1268 - RNA, 123 nt, synthetic construct
  misc_feature 1..123: note = Synthetic
  source 1..123: mol_type = other RNA
cgcgagcacagctaaggccagttttagagctagaaatagcaagttaaaataaggctagtccgttatcaacttgaaaaagtggcaccgagtcggtgcgatgtaatgatgcgtggccttagctgt

SEQ ID NO: 1269 - RNA, 125 nt, synthetic construct
  misc_feature 1..125: note = Synthetic
  source 1..125: mol_type = other RNA
cgcgagcacagctaaggccagttttagagctagaaatagcaagttaaaataaggctagtccgttatcaacttgaaaaagtggcaccgagtcggtgcgagatgtaatgatgcgtggccttagctgt

SEQ ID NO: 1270 - RNA, 127 nt, synthetic construct
  misc_feature 1..127: note = Synthetic
  source 1..127: mol_type = other RNA
cgcgagcacagctaaggccagttttagagctagaaatagcaagttaaaataaggctagtccgttatcaacttgaaaaagtggcaccgagtcggtgcccgagatgtaatgatgcgtggccttagctgt

SEQ ID NO: 1271 - RNA, 129 nt, synthetic construct
  misc_feature 1..129: note = Synthetic
  source 1..129: mol_type = other RNA
cgcgagcacagctaaggccagttttagagctagaaatagcaagttaaaataaggctagtccgttatcaacttgaaaaagtggcaccgagtcggtgcggccgagatgtaatgatgcgtggccttagctgt

SEQ ID NO: 1272 - RNA, 125 nt, synthetic construct
  misc_feature 1..125: note = Synthetic
  source 1..125: mol_type = other RNA
cgcgagcacagctaaggccagttttagagctagaaatagcaagttaaaataaggctagtccgttatcaacttgaaaaagtggcaccgagtcggtgcgatgtaatgatgcgtggccttagctgtgc

SEQ ID NO: 1273 - RNA, 127 nt, synthetic construct
  misc_feature 1..127: note = Synthetic
  source 1..127: mol_type = other RNA
cgcgagcacagctaaggccagttttagagctagaaatagcaagttaaaataaggctagtccgttatcaacttgaaaaagtggcaccgagtcggtgcgagatgtaatgatgcgtggccttagctgtgc

SEQ ID NO: 1274 - RNA, 129 nt, synthetic construct
  misc_feature 1..129: note = Synthetic
  source 1..129: mol_type = other RNA
cgcgagcacagctaaggccagttttagagctagaaatagcaagttaaaataaggctagtccgttatcaacttgaaaaagtggcaccgagtcggtgcccgagatgtaatgatgcgtggccttagctgtgc

SEQ ID NO: 1275 - RNA, 131 nt, synthetic construct
  misc_feature 1..131: note = Synthetic
  source 1..131: mol_type = other RNA
cgcgagcacagctaaggccagttttagagctagaaatagcaagttaaaataaggctagtccgttatcaacttgaaaaagtggcaccgagtcggtgcggccgagatgtaatgatgcgtggccttagctgtgc

SEQ ID NO: 1276 - RNA, 122 nt, synthetic construct
  misc_feature 1..122: note = Synthetic
  source 1..122: mol_type = other RNA
cgcgagcacagctaaggccagttttagagctagaaatagcaagttaaaataaggctagtccgttatcaacttgaaaaagtggcaccgagtcggtgcatgtaatgatgcgtggccttagctgt

SEQ ID NO: 1277 - RNA, 118 nt, synthetic construct
  misc_feature 1..118: note = Synthetic
  source 1..118: mol_type = other RNA
cgcgagcacagctaaggccagttttagagctagaaatagcaagttaaaataaggctagtccgttatcaacttgaaaaagtggcaccgagtcggtgcccgtgtaataagccttagctgt

SEQ ID NO: 1278 - RNA, 116 nt, synthetic construct
  misc_feature 1..116: note = Synthetic
  source 1..116: mol_type = other RNA
cgcgagcacagctaaggccagttttagagctagaaatagcaagttaaaataaggctagtccgttatcaacttgaaaaagtggcaccgagtcggtgcccgtgtaataagccttagct

SEQ ID NO: 1279 - RNA, 124 nt, synthetic construct
  misc_feature 1..124: note = Synthetic
  source 1..124: mol_type = other RNA
cgcgagcacagctaaggccagttttagagctagaaatagcaagttaaaataaggctagtccgttatcaacttgaaaaagtggcaccgagtcggtgcatgtaatgatgcgtggccttagctgtgc

SEQ ID NO: 1280 - RNA, 20 nt, synthetic construct
  misc_feature 1..20: note = Synthetic
  source 1..20: mol_type = other RNA
ggccgagatgtctcgctccg

SEQ ID NO: 1281 - RNA, 20 nt, synthetic construct
  misc_feature 1..20: note = Synthetic
  source 1..20: mol_type = other RNA
ccgagatgcctctcgctgcg

SEQ ID NO: 1282 - RNA, 20 nt, synthetic construct
  misc_feature 1..20: note = Synthetic
  source 1..20: mol_type = other RNA
gagatgtaagtctcgctgcg

SEQ ID NO: 1283 - RNA, 20 nt, synthetic construct
  misc_feature 1..20: note = Synthetic
  source 1..20: mol_type = other RNA
gatgtaataatctcgctgcg

SEQ ID NO: 1284 - RNA, 20 nt, synthetic construct
  misc_feature 1..20: note = Synthetic
  source 1..20: mol_type = other RNA
ggccgagatgtaatgatgcg

SEQ ID NO: 1285 - RNA, 95 nt, synthetic construct; identical to SEQ ID NO: 1025
  misc_feature 1..95: note = Synthetic
  source 1..95: mol_type = other RNA

SEQ ID NO: 1286 - RNA, 95 nt, synthetic construct
  misc_feature 1..95: note = Synthetic
  source 1..95: mol_type = other RNA
ccgagatgcctctcgctgcggttttagagctagaaatagcaagttaaaataaggctagtccgttatcaacttgaaaaagtggcaccgagtcggtg

SEQ ID NO: 1287 - RNA, 95 nt, synthetic construct
  misc_feature 1..95: note = Synthetic
  source 1..95: mol_type = other RNA
gagatgtaagtctcgctgcggttttagagctagaaatagcaagttaaaataaggctagtccgttatcaacttgaaaaagtggcaccgagtcggtg

SEQ ID NO: 1288 - RNA, 95 nt, synthetic construct
  misc_feature 1..95: note = Synthetic
  source 1..95: mol_type = other RNA
gatgtaataatctcgctgcggttttagagctagaaatagcaagttaaaataaggctagtccgttatcaacttgaaaaagtggcaccgagtcggtg

SEQ ID NO: 1289 - RNA, 95 nt, synthetic construct
  misc_feature 1..95: note = Synthetic
  source 1..95: mol_type = other RNA
ggccgagatgtaatgatgcggttttagagctagaaatagcaagttaaaataaggctagtccgttatcaacttgaaaaagtggcaccgagtcggtg

SEQ ID NO: 1290-1299 - skipped (10 entries)

SEQ ID NO: 1300 - RNA, 17 nt, synthetic construct
  misc_feature 1..17: note = Synthetic
  source 1..17: mol_type = other RNA
ctgggttggggcaaaga

SEQ ID NO: 1301 - RNA, 18 nt, synthetic construct
  misc_feature 1..18: note = Synthetic
  source 1..18: mol_type = other RNA
cctgggttggggcaaaga

SEQ ID NO: 1302 - RNA, 19 nt, synthetic construct
  misc_feature 1..19: note = Synthetic
  source 1..19: mol_type = other RNA
gcctgggttggggcaaaga

SEQ ID NO: 1303 - RNA, 20 nt, synthetic construct
  misc_feature 1..20: note = Synthetic
  source 1..20: mol_type = other RNA
agcctgggttggggcaaaga

SEQ ID NO: 1304 - RNA, 21 nt, synthetic construct
  misc_feature 1..21: note = Synthetic
  source 1..21: mol_type = other RNA
cagcctgggttggggcaaaga

SEQ ID NO: 1305 - RNA, 22 nt, synthetic construct
  misc_feature 1..22: note = Synthetic
  source 1..22: mol_type = other RNA
ccagcctgggttggggcaaaga

SEQ ID NO: 1306-1310 - skipped (5 entries)

SEQ ID NO: 1311 - RNA, 10 nt, synthetic construct
  misc_feature 1..10: note = Synthetic
  source 1..10: mol_type = other RNA
ttgccccaac

SEQ ID NO: 1312 - RNA, 11 nt, synthetic construct
  misc_feature 1..11: note = Synthetic
  source 1..11: mol_type = other RNA
ttgccccaacc

SEQ ID NO: 1313 - RNA, 12 nt, synthetic construct
  misc_feature 1..12: note = Synthetic
  source 1..12: mol_type = other RNA
ttgccccaaccc

SEQ ID NO: 1314 - RNA, 13 nt, synthetic construct
  misc_feature 1..13: note = Synthetic
  source 1..13: mol_type = other RNA
ttgccccaaccca

SEQ ID NO: 1315 - RNA, 14 nt, synthetic construct
  misc_feature 1..14: note = Synthetic
  source 1..14: mol_type = other RNA
ttgccccaacccag

SEQ ID NO: 1316 - RNA, 15 nt, synthetic construct
  misc_feature 1..15: note = Synthetic
  source 1..15: mol_type = other RNA
ttgccccaacccagg

SEQ ID NO: 1317 - RNA, 16 nt, synthetic construct
  misc_feature 1..16: note = Synthetic
  source 1..16: mol_type = other RNA
ttgccccaacccaggc

SEQ ID NO: 1318 - RNA, 17 nt, synthetic construct
  misc_feature 1..17: note = Synthetic
  source 1..17: mol_type = other RNA
ttgccccaacccaggct

SEQ ID NO: 1319 - RNA, 18 nt, synthetic construct
  misc_feature 1..18: note = Synthetic
  source 1..18: mol_type = other RNA
ttgccccaacccaggctg

SEQ ID NO: 1320 - RNA, 19 nt, synthetic construct
  misc_feature 1..19: note = Synthetic
  source 1..19: mol_type = other RNA
ttgccccaacccaggctgg

SEQ ID NO: 1321 - RNA, 132 nt, synthetic construct
  misc_feature 1..132: note = Synthetic
  source 1..132: mol_type = other RNA
agcctgggttggggcaaagagttttagagctagaaatagcaagttaaaataaggctagtccgttatcaacttgaaaaagtggcaccgagtcggtgcacgacggagaccgccgtcgtcgacaagccttgcccc

SEQ ID NO: 1322 - RNA, 136 nt, synthetic construct
  misc_feature 1..136: note = Synthetic
  source 1..136: mol_type = other RNA
agcctgggttggggcaaagagttttagagctagaaatagcaagttaaaataaggctagtccgttatcaacttgaaaaagtggcaccgagtcggtgcacgacggagaccgccgtcgtcgacaagccttgccccaacc

SEQ ID NO: 1323 - skipped

SEQ ID NO: 1324 - RNA, 137 nt, synthetic construct
  misc_feature 1..137: note = Synthetic
  source 1..137: mol_type = other RNA
agcctgggttggggcaaagagttttagagctagaaatagcaagttaaaataaggctagtccgttatcaacttgaaaaagtggcaccgagtcggtgcgacgacggagaccgccgtcgtcgacaagccttgccccaacc

SEQ ID NO: 1325 - skipped

SEQ ID NO: 1326 - RNA, 139 nt, synthetic construct
  misc_feature 1..139: note = Synthetic
  source 1..139: mol_type = other RNA
agcctgggttggggcaaagagttttagagctagaaatagcaagttaaaataaggctagtccgttatcaacttgaaaaagtggcaccgagtcggtgcgacgacggagaccgccgtcgtcgacaagccttgccccaaccca

SEQ ID NO: 1327 - skipped

SEQ ID NO: 1328 - RNA, 141 nt, synthetic construct
  misc_feature 1..141: note = Synthetic
  source 1..141: mol_type = other RNA
agcctgggttggggcaaagagttttagagctagaaatagcaagttaaaataaggctagtccgttatcaacttgaaaaagtggcaccgagtcggtgcgacgacggagaccgccgtcgtcgacaagccttgccccaacctttt

SEQ ID NO: 1329 - RNA, 141 nt, synthetic construct
  misc_feature 1..141: note = Synthetic
  source 1..141: mol_type = other RNA
agcctgggttggggcaaagagttttagagctagaaatagcaagttaaaataaggctagtccgttatcaacttgaaaaagtggcaccgagtcggtgcatgatcctgacgacggagaccgccgtcgtcgacaagccttgcccc

SEQ ID NO: 1330 - RNA, 141 nt, synthetic construct
  misc_feature 1..141: note = Synthetic
  source 1..141: mol_type = other RNA
agcctgggttggggcaaagagttttagagctagaaatagcaagttaaaataaggctagtccgttatcaacttgaaaaagtggcaccgagtcggtgcgacgacggagaccgccgtcgtcgacaagccttgccccaacccagg

SEQ ID NO: 1331-1332 - skipped (2 entries)

SEQ ID NO: 1333 - RNA, 143 nt, synthetic construct
  misc_feature 1..143: note = Synthetic
  source 1..143: mol_type = other RNA
agcctgggttggggcaaagagttttagagctagaaatagcaagttaaaataaggctagtccgttatcaacttgaaaaagtggcaccgagtcggtgcgacgacggagaccgccgtcgtcgacaagccttgccccaacccatttt

SEQ ID NO: 1334 - RNA, 143 nt, synthetic construct
  misc_feature 1..143: note = Synthetic
  source 1..143: mol_type = other RNA
agcctgggttggggcaaagagttttagagctagaaatagcaagttaaaataaggctagtccgttatcaacttgaaaaagtggcaccgagtcggtgcgacgacggagaccgccgtcgtcgacaagccttgccccaacccaggct

SEQ ID NO: 1335 - RNA, 143 nt, synthetic construct
  misc_feature 1..143: note = Synthetic
  source 1..143: mol_type = other RNA
agcctgggttggggcaaagagttttagagctagaaatagcaagttaaaataaggctagtccgttatcaacttgaaaaagtggcaccgagtcggtgcatgatcctgacgacggagaccgccgtcgtcgacaagccttgccccaa

SEQ ID NO: 1336 - RNA, 145 nt, synthetic construct
  misc_feature 1..145: note = Synthetic
  source 1..145: mol_type = other RNA
agcctgggttggggcaaagagttttagagctagaaatagcaagttaaaataaggctagtccgttatcaacttgaaaaagtggcaccgagtcggtgcatgatcctgacgacggagaccgccgtcgtcgacaagccttgccccaacc

SEQ ID NO: 1337 - RNA, 145 nt, synthetic construct
  misc_feature 1..145: note = Synthetic
  source 1..145: mol_type = other RNA
agcctgggttggggcaaagagttttagagctagaaatagcaagttaaaataaggctagtccgttatcaacttgaaaaagtggcaccgagtcggtgcgacgacggagaccgccgtcgtcgacaagccttgccccaacccaggtttt

SEQ ID NO: 1338 - skipped

SEQ ID NO: 1339 - RNA, 147 nt, synthetic construct
  misc_feature 1..147: note = Synthetic
  source 1..147: mol_type = other RNA
agcctgggttggggcaaagagttttagagctagaaatagcaagttaaaataaggctagtccgttatcaacttgaaaaagtggcaccgagtcggtgcgacgacggagaccgccgtcgtcgacaagccttgccccaacccaggcttttt

SEQ ID NO: 1340 - RNA, 147 nt, synthetic construct
  misc_feature 1..147: note = Synthetic
  source 1..147: mol_type = other RNA
agcctgggttggggcaaagagttttagagctagaaatagcaagttaaaataaggctagtccgttatcaacttgaaaaagtggcaccgagtcggtgcatgatcctgacgacggagaccgccgtcgtcgacaagccttgccccaatttt

SEQ ID NO: 1341 - RNA, 147 nt, synthetic construct
  misc_feature 1..147: note = Synthetic
  source 1..147: mol_type = other RNA
agcctgggttggggcaaagagttttagagctagaaatagcaagttaaaataaggctagtccgttatcaacttgaaaaagtggcaccgagtcggtgcatgatcctgacgacggagaccgccgtcgtcgacaagccttgccccaaccca

SEQ ID NO: 1342 - skipped

SEQ ID NO: 1343 - RNA, 149 nt, synthetic construct
  misc_feature 1..149: note = Synthetic
  source 1..149: mol_type = other RNA
agcctgggttggggcaaagagttttagagctagaaatagcaagttaaaataaggctagtccgttatcaacttgaaaaagtggcaccgagtcggtgcatgatcctgacgacggagaccgccgtcgtcgacaagccttgccccaacctttt

SEQ ID NO: 1344 - RNA, 149 nt, synthetic construct
  misc_feature 1..149: note = Synthetic
  source 1..149: mol_type = other RNA
agcctgggttggggcaaagagttttagagctagaaatagcaagttaaaataaggctagtccgttatcaacttgaaaaagtggcaccgagtcggtgcatgatcctgacgacggagaccgccgtcgtcgacaagccttgccccaacccagg

SEQ ID NO: 1345 - RNA, 151 nt, synthetic construct
  misc_feature 1..151: note = Synthetic
  source 1..151: mol_type = other RNA
agcctgggttggggcaaagagttttagagctagaaatagcaagttaaaataaggctagtccgttatcaacttgaaaaagtggcaccgagtcggtgcatgatcctgacgacggagaccgccgtcgtcgacaagccttgccccaacccatttt

SEQ ID NO: 1346 - RNA, 151 nt, synthetic construct
  misc_feature 1..151: note = Synthetic
  source 1..151: mol_type = other RNA
agcctgggttggggcaaagagttttagagctagaaatagcaagttaaaataaggctagtccgttatcaacttgaaaaagtggcaccgagtcggtgcatgatcctgacgacggagaccgccgtcgtcgacaagccttgccccaacccaggct

SEQ ID NO: 1347 - skipped

SEQ ID NO: 1348 - RNA, 153 nt, synthetic construct
  misc_feature 1..153: note = Synthetic
  source 1..153: mol_type = other RNA
agcctgggttggggcaaagagttttagagctagaaatagcaagttaaaataaggctagtccgttatcaacttgaaaaagtggcaccgagtcggtgcatgatcctgacgacggagaccgccgtcgtcgacaagccttgccccaacccaggtttt

SEQ ID NO: 1349 - RNA, 155 nt, synthetic construct
  misc_feature 1..155: note = Synthetic
  source 1..155: mol_type = other RNA
agcctgggttggggcaaagagttttagagctagaaatagcaagttaaaataaggctagtccgttatcaacttgaaaaagtggcaccgagtcggtgcatgatcctgacgacggagaccgccgtcgtcgacaagccttgccccaacccaggcttttt

SEQ ID NO: 1350 - RNA, 17 nt, synthetic construct
  misc_feature 1..17: note = Synthetic
  source 1..17: mol_type = other RNA
gactccagcctgggttg

SEQ ID NO: 1351 - RNA, 18 nt, synthetic construct
  misc_feature 1..18: note = Synthetic
  source 1..18: mol_type = other RNA
ggactccagcctgggttg

SEQ ID NO: 1352 - RNA, 19 nt, synthetic construct
  misc_feature 1..19: note = Synthetic
  source 1..19: mol_type = other RNA
tggactccagcctgggttg

SEQ ID NO: 1353 - RNA, 20 nt, synthetic construct
  misc_feature 1..20: note = Synthetic
  source 1..20: mol_type = other RNA
ctggactccagcctgggttg

SEQ ID NO: 1354 - RNA, 21 nt, synthetic construct
  misc_feature 1..21: note = Synthetic
  source 1..21: mol_type = other RNA
tctggactccagcctgggttg

SEQ ID NO: 1355 - RNA, 22 nt, synthetic construct
  misc_feature 1..22: note = Synthetic
  source 1..22: mol_type = other RNA
atctggactccagcctgggttg

SEQ ID NO: 1356 - RNA, 10 nt, synthetic construct
  misc_feature 1..10: note = Synthetic
  source 1..10: mol_type = other RNA
cccaggctgg

SEQ ID NO: 1357-1361 - skipped (5 entries)

SEQ ID NO: 1362 - RNA, 11 nt, synthetic construct
  misc_feature 1..11: note = Synthetic
  source 1..11: mol_type = other RNA
cccaggctgga

SEQ ID NO: 1363 - RNA, 12 nt, synthetic construct
  misc_feature 1..12: note = Synthetic
  source 1..12: mol_type = other RNA
cccaggctggag

SEQ ID NO: 1364 - RNA, 13 nt, synthetic construct
  misc_feature 1..13: note = Synthetic
  source 1..13: mol_type = other RNA
cccaggctggagt

SEQ ID NO: 1365 - RNA, 14 nt, synthetic construct
  misc_feature 1..14: note = Synthetic
  source 1..14: mol_type = other RNA
cccaggctggagtc

SEQ ID NO: 1366 - RNA, 15 nt, synthetic construct
  misc_feature 1..15: note = Synthetic
  source 1..15: mol_type = other RNA
cccaggctggagtcc

SEQ ID NO: 1367 - RNA, 16 nt, synthetic construct
  misc_feature 1..16: note = Synthetic
  source 1..16: mol_type = other RNA
cccaggctggagtcca

SEQ ID NO: 1368 - RNA, 17 nt, synthetic construct
  misc_feature 1..17: note = Synthetic
  source 1..17: mol_type = other RNA
cccaggctggagtccag

SEQ ID NO: 1369 - RNA, 18 nt, synthetic construct
  misc_feature 1..18: note = Synthetic
  source 1..18: mol_type = other RNA
cccaggctggagtccaga

SEQ ID NO: 1370 - RNA, 19 nt, synthetic construct
  misc_feature 1..19: note = Synthetic
  source 1..19: mol_type = other RNA
cccaggctggagtccagat

SEQ ID NO: 1371 - RNA, 131 nt, synthetic construct
  misc_feature 1..131: note = Synthetic
  source 1..131: mol_type = other RNA
ctggactccagcctgggttggttttagagctagaaatagcaagttaaaataaggctagtccgttatcaacttgaaaaagtggcaccgagtcggtgcacgacggagaccgccgtcgtcgacaagcccccagg

SEQ ID NO: 1372 - RNA, 135 nt, synthetic construct
  misc_feature 1..135: note = Synthetic
  source 1..135: mol_type = other RNA
ctggactccagcctgggttggttttagagctagaaatagcaagttaaaataaggctagtccgttatcaacttgaaaaagtggcaccgagtcggtgcacgacggagaccgccgtcgtcgacaagcccccaggctgg

SEQ ID NO: 1373 - skipped

SEQ ID NO: 1374 - RNA, 137 nt, synthetic construct
  misc_feature 1..137: note = Synthetic
  source 1..137: mol_type = other RNA
ctggactccagcctgggttggttttagagctagaaatagcaagttaaaataaggctagtccgttatcaacttgaaaaagtggcaccgagtcggtgcgacgacggagaccgccgtcgtcgacaagcccccaggctgga

SEQ ID NO: 1375 - RNA, 137 nt, synthetic construct
  misc_feature 1..137: note = Synthetic
  source 1..137: mol_type = other RNA
ctggactccagcctgggttggttttagagctagaaatagcaagttaaaataaggctagtccgttatcaacttgaaaaagtggcaccgagtcggtgcgacgacggcggtctccgtcgtcaggatcatcccaggctgga

SEQ ID NO: 1376 - skipped

SEQ ID NO: 1377 - RNA, 139 nt, synthetic construct
  misc_feature 1..139: note = Synthetic
  source 1..139: mol_type = other RNA
ctggactccagcctgggttggttttagagctagaaatagcaagttaaaataaggctagtccgttatcaacttgaaaaagtggcaccgagtcggtgcgacgacggagaccgccgtcgtcgacaagcccccaggctggagt

SEQ ID NO: 1378 - RNA, 139 nt, synthetic construct
  misc_feature 1..139: note = Synthetic
  source 1..139: mol_type = other RNA
ctggactccagcctgggttggttttagagctagaaatagcaagttaaaataaggctagtccgttatcaacttgaaaaagtggcaccgagtcggtgcgacgacggcggtctccgtcgtcaggatcatcccaggctggagt

SEQ ID NO: 1379 - RNA, 140 nt, synthetic construct
  misc_feature 1..140: note = Synthetic
  source 1..140: mol_type = other RNA
ctggactccagcctgggttggttttagagctagaaatagcaagttaaaataaggctagtccgttatcaacttgaaaaagtggcaccgagtcggtgcatgatcctgacgacggagaccgccgtcgtcgacaagcccccagg

SEQ ID NO: 1380-1381 - skipped (2 entries)

SEQ ID NO: 1382 - RNA, 141 nt, synthetic construct
  misc_feature 1..141: note = Synthetic
  source 1..141: mol_type = other RNA
ctggactccagcctgggttggttttagagctagaaatagcaagttaaaataaggctagtccgttatcaacttgaaaaagtggcaccgagtcggtgcgacgacggagaccgccgtcgtcgacaagcccccaggctggatttt

SEQ ID NO: 1383 - RNA, 141 nt, synthetic construct
  misc_feature 1..141: note = Synthetic
  source 1..141: mol_type = other RNA
ctggactccagcctgggttggttttagagctagaaatagcaagttaaaataaggctagtccgttatcaacttgaaaaagtggcaccgagtcggtgcgacgacggcggtctccgtcgtcaggatcatcccaggctggatttt

SEQ ID NO: 1384 - RNA, 141 nt, synthetic construct
  misc_feature 1..141: note = Synthetic
  source 1..141: mol_type = other RNA
ctggactccagcctgggttggttttagagctagaaatagcaagttaaaataaggctagtccgttatcaacttgaaaaagtggcaccgagtcggtgcgacgacggagaccgccgtcgtcgacaagcccccaggctggagtcc

SEQ ID NO: 1385 - skipped

SEQ ID NO: 1386 - RNA, 142 nt, synthetic construct
  misc_feature 1..142: note = Synthetic
  source 1..142: mol_type = other RNA
ctggactccagcctgggttggttttagagctagaaatagcaagttaaaataaggctagtccgttatcaacttgaaaaagtggcaccgagtcggtgcatgatcctgacgacggagaccgccgtcgtcgacaagcccccaggct

SEQ ID NO: 1387 - RNA, 143 nt, synthetic construct
  misc_feature 1..143: note = Synthetic
  source 1..143: mol_type = other RNA
ctggactccagcctgggttggttttagagctagaaatagcaagttaaaataaggctagtccgttatcaacttgaaaaagtggcaccgagtcggtgcgacgacggagaccgccgtcgtcgacaagcccccaggctggagttttt

SEQ ID NO: 1388 - RNA, 143 nt, synthetic construct
  misc_feature 1..143: note = Synthetic
  source 1..143: mol_type = other RNA
ctggactccagcctgggttggttttagagctagaaatagcaagttaaaataaggctagtccgttatcaacttgaaaaagtggcaccgagtcggtgcgacgacggcggtctccgtcgtcaggatcatcccaggctggagttttt

SEQ ID NO: 1389 - RNA, 143 nt, synthetic construct
  misc_feature 1..143: note = Synthetic
  source 1..143: mol_type = other RNA
ctggactccagcctgggttggttttagagctagaaatagcaagttaaaataaggctagtccgttatcaacttgaaaaagtggcaccgagtcggtgcgacgacggagaccgccgtcgtcgacaagcccccaggctggagtccag

SEQ ID NO: 1390 - RNA, 144 nt, synthetic construct
  misc_feature 1..144: note = Synthetic
  source 1..144: mol_type = other RNA
ctggactccagcctgggttggttttagagctagaaatagcaagttaaaataaggctagtccgttatcaacttgaaaaagtggcaccgagtcggtgcatgatcctgacgacggagaccgccgtcgtcgacaagcccccaggctgg

SEQ ID NO: 1391-1392 - skipped (2 entries)

SEQ ID NO: 1393 - RNA, 145 nt, synthetic construct
  misc_feature 1..145: note = Synthetic
  source 1..145: mol_type = other RNA
ctggactccagcctgggttggttttagagctagaaatagcaagttaaaataaggctagtccgttatcaacttgaaaaagtggcaccgagtcggtgcgacgacggagaccgccgtcgtcgacaagcccccaggctggagtcctttt

SEQ ID NO: 1394 - RNA, 145 nt, synthetic construct
  misc_feature 1..145: note = Synthetic
  source 1..145: mol_type = other RNA
ctggactccagcctgggttggttttagagctagaaatagcaagttaaaataaggctagtccgttatcaacttgaaaaagtggcaccgagtcggtgcatgatcctgacgacggagaccgccgtcgtcgacaagcccccaggctgga

SEQ ID NO: 1395 - RNA, 145 nt, synthetic construct
  misc_feature 1..145: note = Synthetic
  source 1..145: mol_type = other RNA
ctggactccagcctgggttggttttagagctagaaatagcaagttaaaataaggctagtccgttatcaacttgaaaaagtggcaccgagtcggtgcggcttgtcgacgacggcggtctccgtcgtcaggatcatcccaggctgga

SEQ ID NO: 1396 - RNA, 146 nt, synthetic construct
  misc_feature 1..146: note = Synthetic
  source 1..146: mol_type = other RNA
ctggactccagcctgggttggttttagagctagaaatagcaagttaaaataaggctagtccgttatcaacttgaaaaagtggcaccgagtcggtgcatgatcctgacgacggagaccgccgtcgtcgacaagcccccaggcttttt

SEQ ID NO: 1397 - skipped

SEQ ID NO: 1398 - RNA, 147 nt, synthetic construct
  misc_feature 1..147: note = Synthetic
  source 1..147: mol_type = other RNA
ctggactccagcctgggttggttttagagctagaaatagcaagttaaaataaggctagtccgttatcaacttgaaaaagtggcaccgagtcggtgcgacgacggagaccgccgtcgtcgacaagcccccaggctggagtccagtttt

SEQ ID NO: 1399 - RNA, 147 nt, synthetic construct
  misc_feature 1..147: note = Synthetic
  source 1..147: mol_type = other RNA
ctggactccagcctgggttggttttagagctagaaatagcaagttaaaataaggctagtccgttatcaacttgaaaaagtggcaccgagtcggtgcatgatcctgacgacggagaccgccgtcgtcgacaagcccccaggctggagt

SEQ ID NO: 1400 - RNA, 147 nt, synthetic construct
  misc_feature 1..147: note = Synthetic
  source 1..147: mol_type = other RNA
ctggactccagcctgggttggttttagagctagaaatagcaagttaaaataaggctagtccgttatcaacttgaaaaagtggcaccgagtcggtgcggcttgtcgacgacggcggtctccgtcgtcaggatcatcccaggctggagt

SEQ ID NO: 1401 - RNA, 148 nt, synthetic construct
  misc_feature 1..148: note = Synthetic
  source 1..148: mol_type = other RNA
ctggactccagcctgggttggttttagagctagaaatagcaagttaaaataaggctagtccgttatcaacttgaaaaagtggcaccgagtcggtgcatgatcctgacgacggagaccgccgtcgtcgacaagcccccaggctggtttt

SEQ ID NO: 1402 - skipped

SEQ ID NO: 1403 - RNA, 149 nt, synthetic construct
  misc_feature 1..149: note = Synthetic
  source 1..149: mol_type = other RNA
ctggactccagcctgggttggttttagagctagaaatagcaagttaaaataaggctagtccgttatcaacttgaaaaagtggcaccgagtcggtgcatgatcctgacgacggagaccgccgtcgtcgacaagcccccaggctggatttt

SEQ ID NO: 1404 - RNA, 149 nt, synthetic construct
  misc_feature 1..149: note = Synthetic
  source 1..149: mol_type = other RNA
ctggactccagcctgggttggttttagagctagaaatagcaagttaaaataaggctagtccgttatcaacttgaaaaagtggcaccgagtcggtgcggcttgtcgacgacggcggtctccgtcgtcaggatcatcccaggctggatttt

SEQ ID NO: 1405 - RNA, 149 nt, synthetic construct
  misc_feature 1..149: note = Synthetic
  source 1..149: mol_type = other RNA
ctggactccagcctgggttggttttagagctagaaatagcaagttaaaataaggctagtccgttatcaacttgaaaaagtggcaccgagtcggtgcatgatcctgacgacggagaccgccgtcgtcgacaagcccccaggctggagtcc

SEQ ID NO: 1406 - RNA, 151 nt, synthetic construct
  misc_feature 1..151: note = Synthetic
  source 1..151: mol_type = other RNA
ctggactccagcctgggttggttttagagctagaaatagcaagttaaaataaggctagtccgttatcaacttgaaaaagtggcaccgagtcggtgcatgatcctgacgacggagaccgccgtcgtcgacaagcccccaggctggagttttt

SEQ ID NO: 1407 - RNA, 151 nt, synthetic construct
  misc_feature 1..151: note = Synthetic
  source 1..151: mol_type = other RNA
ctggactccagcctgggttggttttagagctagaaatagcaagttaaaataaggctagtccgttatcaacttgaaaaagtggcaccgagtcggtgcggcttgtcgacgacggcggtctccgtcgtcaggatcatcccaggctggagttttt

SEQ ID NO: 1408 - RNA, 151 nt, synthetic construct
  misc_feature 1..151: note = Synthetic
  source 1..151: mol_type = other RNA
ctggactccagcctgggttggttttagagctagaaatagcaagttaaaataaggctagtccgttatcaacttgaaaaagtggcaccgagtcggtgcatgatcctgacgacggagaccgccgtcgtcgacaagcccccaggctggagtccag

SEQ ID NO: 1409-1410 - skipped (2 entries)

SEQ ID NO: 1411 - RNA, 153 nt, synthetic construct
  misc_feature 1..153: note = Synthetic
  source 1..153: mol_type = other RNA
ctggactccagcctgggttggttttagagctagaaatagcaagttaaaataaggctagtccgttatcaacttgaaaaagtggcaccgagtcggtgcatgatcctgacgacggagaccgccgtcgtcgacaagcccccaggctggagtcctttt

SEQ ID NO: 1412 - RNA, 155 nt, synthetic construct
  misc_feature 1..155: note = Synthetic
  source 1..155: mol_type = other RNA
ctggactccagcctgggttggttttagagctagaaatagcaagttaaaataaggctagtccgttatcaacttgaaaaagtggcaccgagtcggtgcatgatcctgacgacggagaccgccgtcgtcgacaagcccccaggctggagtccagtttt

SEQ ID NO: 1413 - RNA, 139 nt, synthetic construct
  misc_feature 1..139: note = Synthetic
  source 1..139: mol_type = other RNA
ctggactccagcctgggttggttttagagctagaaatagcaagttaaaataaggctagtccgttatcaacttgaaaaagtggcaccgagtcggtgcacgacggagaccgccgtcgtcgacaagcccccaggctggtttt

SEQ ID NO: 1414 - RNA, 17 nt, synthetic construct
  misc_feature 1..17: note = Synthetic
  source 1..17: mol_type = other RNA
gtctctcagctggtaca

SEQ ID NO: 1415 - RNA, 18 nt, synthetic construct
  misc_feature 1..18: note = Synthetic
  source 1..18: mol_type = other RNA
agtctctcagctggtaca

SEQ ID NO: 1416 - RNA, 19 nt, synthetic construct
  misc_feature 1..19: note = Synthetic
  source 1..19: mol_type = other RNA
gagtctctcagctggtaca

SEQ ID NO: 1417 - RNA, 20 nt, synthetic construct
  misc_feature 1..20: note = Synthetic
  source 1..20: mol_type = other RNA
agagtctctcagctggtaca

SEQ ID NO: 1418 - RNA, 21 nt, synthetic construct
  misc_feature 1..21: note = Synthetic
  source 1..21: mol_type = other RNA
tagagtctctcagctggtaca

SEQ ID NO: 1419 - RNA, 22 nt, synthetic construct
  misc_feature 1..22: note = Synthetic
  source 1..22: mol_type = other RNA
ttagagtctctcagctggtaca

SEQ ID NO: 1420 - RNA, 10 nt, synthetic construct
  misc_feature 1..10: note = Synthetic
  source 1..10: mol_type = other RNA
accagctgag

SEQ ID NO: 1421-1425 - skipped (5 entries)

SEQ ID NO: 1426 - RNA, 11 nt, synthetic construct
  misc_feature 1..11: note = Synthetic
  source 1..11: mol_type = other RNA
accagctgaga

SEQ ID NO: 1427 - RNA, 12 nt, synthetic construct
  misc_feature 1..12: note = Synthetic
  source 1..12: mol_type = other RNA
accagctgagag

SEQ ID NO: 1428 - RNA, 13 nt, synthetic construct
  misc_feature 1..13: note = Synthetic
  source 1..13: mol_type = other RNA
accagctgagaga

SEQ ID NO: 1429 - RNA, 14 nt, synthetic construct
  misc_feature 1..14: note = Synthetic
  source 1..14: mol_type = other RNA
accagctgagagac

SEQ ID NO: 1430 - RNA, 15 nt, synthetic construct
  misc_feature 1..15: note = Synthetic
  source 1..15: mol_type = other RNA
accagctgagagact

SEQ ID NO: 1431 - RNA, 16 nt, synthetic construct
  misc_feature 1..16: note = Synthetic
  source 1..16: mol_type = other RNA
accagctgagagactc

SEQ ID NO: 1432 - RNA, 17 nt, synthetic construct
  misc_feature 1..17: note = Synthetic
  source 1..17: mol_type = other RNA
accagctgagagactct

SEQ ID NO: 1433 - RNA, 18 nt, synthetic construct
  misc_feature 1..18: note = Synthetic
  source 1..18: mol_type = other RNA
accagctgagagactcta

SEQ ID NO: 1434 - RNA, 19 nt, synthetic construct
  misc_feature 1..19: note = Synthetic
  source 1..19: mol_type = other RNA
accagctgagagactctaa

SEQ ID NO: 1435 - RNA, 131 nt, synthetic construct
  misc_feature 1..131: note = Synthetic
  source 1..131: mol_type = other RNA
agagtctctcagctggtacagttttagagctagaaatagcaagttaaaataaggctagtccgttatcaacttgaaaaagtggcaccgagtcggtgcacggcggtctccgtcgtcaggatcataccagctga

SEQ ID NO: 1436 - skipped

SEQ ID NO: 1437 - RNA, 134 nt, synthetic construct
  misc_feature 1..134: note = Synthetic
  source 1..134: mol_type = other RNA
agagtctctcagctggtacagttttagagctagaaatagcaagttaaaataaggctagtccgttatcaacttgaaaaagtggcaccgagtcggtgcacgacggcggtctccgtcgtcaggatcataccagctga

SEQ ID NO: 1438 - RNA, 135 nt, synthetic construct
  misc_feature 1..135: note = Synthetic
  source 1..135: mol_type = other RNA
agagtctctcagctggtacagttttagagctagaaatagcaagttaaaataaggctagtccgttatcaacttgaaaaagtggcaccgagtcggtgcacggcggtctccgtcgtcaggatcataccagctgatttt

SEQ ID NO: 1439-1440 - skipped (2 entries)

SEQ ID NO: 1441 - RNA, 137 nt, synthetic construct
  misc_feature 1..137: note = Synthetic
  source 1..137: mol_type = other RNA
agagtctctcagctggtacagttttagagctagaaatagcaagttaaaataaggctagtccgttatcaacttgaaaaagtggcaccgagtcggtgcgacgacggcggtctccgtcgtcaggatcataccagctgaga

SEQ ID NO: 1442 - RNA, 138 nt, synthetic construct
  misc_feature 1..138: note = Synthetic
  source 1..138: mol_type = other RNA
agagtctctcagctggtacagttttagagctagaaatagcaagttaaaataaggctagtccgttatcaacttgaaaaagtggcaccgagtcggtgcacgacggcggtctccgtcgtcaggatcataccagctgagaga

SEQ ID NO: 1443-1444 - skipped (2 entries)

SEQ ID NO: 1445 - RNA, 139 nt, synthetic construct
  misc_feature 1..139: note = Synthetic
  source 1..139: mol_type = other RNA
agagtctctcagctggtacagttttagagctagaaatagcaagttaaaataaggctagtccgttatcaacttgaaaaagtggcaccgagtcggtgcgacgacggcggtctccgtcgtcaggatcataccagctgagaga

SEQ ID NO: 1446 - RNA, 139 nt, synthetic construct
  misc_feature 1..139: note = Synthetic
  source 1..139: mol_type = other RNA
agagtctctcagctggtacagttttagagctagaaatagcaagttaaaataaggctagtccgttatcaacttgaaaaagtggcaccgagtcggtgcgacgacggagaccgccgtcgtcgacaagccaccagctgagaga

SEQ ID NO: 1447 - RNA, 141 nt, synthetic construct
  misc_feature 1..141: note = Synthetic
  source 1..141: mol_type = other RNA
agagtctctcagctggtacagttttagagctagaaatagcaagttaaaataaggctagtccgttatcaacttgaaaaagtggcaccgagtcggtgcgacgacggcggtctccgtcgtcaggatcataccagctgagatttt

SEQ ID NO: 1448 - RNA, 141 nt, synthetic construct
  misc_feature 1..141: note = Synthetic
  source 1..141: mol_type = other RNA
agagtctctcagctggtacagttttagagctagaaatagcaagttaaaataaggctagtccgttatcaacttgaaaaagtggcaccgagtcggtgcgacgacggcggtctccgtcgtcaggatcataccagctgagagact

SEQ ID NO: 1449 - skipped

SEQ ID NO: 1450 - RNA, 143 nt, synthetic construct
  misc_feature 1..143: note = Synthetic
  source 1..143: mol_type = other RNA
agagtctctcagctggtacagttttagagctagaaatagcaagttaaaataaggctagtccgttatcaacttgaaaaagtggcaccgagtcggtgcgacgacggcggtctccgtcgtcaggatcataccagctgagagatttt

SEQ ID NO: 1451 - RNA, 143 nt, synthetic construct
  misc_feature 1..143: note = Synthetic
  source 1..143: mol_type = other RNA
agagtctctcagctggtacagttttagagctagaaatagcaagttaaaataaggctagtccgttatcaacttgaaaaagtggcaccgagtcggtgcgacgacggagaccgccgtcgtcgacaagccaccagctgagagatttt

SEQ ID NO: 1452 - RNA, 143 nt, synthetic construct
  misc_feature 1..143: note = Synthetic
  source 1..143: mol_type = other RNA
agagtctctcagctggtacagttttagagctagaaatagcaagttaaaataaggctagtccgttatcaacttgaaaaagtggcaccgagtcggtgcggcttgtcgacgacggcggtctccgtcgtcaggatcataccagctga

SEQ ID NO: 1453 - skipped

SEQ ID NO: 1454 - RNA, 145 nt, synthetic construct
  misc_feature 1..145: note = Synthetic
  source 1..145: mol_type = other RNA
agagtctctcagctggtacagttttagagctagaaatagcaagttaaaataaggctagtccgttatcaacttgaaaaagtggcaccgagtcggtgcgacgacggcggtctccgtcgtcaggatcataccagctgagagacttttt

SEQ ID NO: 1455 - RNA, 145 nt, synthetic construct
  misc_feature 1..145: note = Synthetic
  source 1..145: mol_type = other RNA
agagtctctcagctggtacagttttagagctagaaatagcaagttaaaataaggctagtccgttatcaacttgaaaaagtggcaccgagtcggtgcggcttgtcgacgacggcggtctccgtcgtcaggatcataccagctgaga

SEQ ID NO: 1456 - RNA, 147 nt, synthetic construct
  misc_feature 1..147: note = Synthetic
  source 1..147: mol_type = other RNA
agagtctctcagctggtacagttttagagctagaaatagcaagttaaaataaggctagtccgttatcaacttgaaaaagtggcaccgagtcggtgcggcttgtcgacgacggcggtctccgtcgtcaggatcataccagctgagaga

SEQ ID NO: 1457 - RNA, 147 nt, synthetic construct
  misc_feature 1..147: note = Synthetic
  source 1..147: mol_type = other RNA
agagtctctcagctggtacagttttagagctagaaatagcaagttaaaataaggctagtccgttatcaacttgaaaaagtggcaccgagtcggtgcggcttgtcgacgacggcggtctccgtcgtcaggatcataccagctgatttt

SEQ ID NO: 1458 - skipped

SEQ ID NO: 1459 - RNA, 149 nt, synthetic construct
  misc_feature 1..149: note = Synthetic
  source 1..149: mol_type = other RNA
agagtctctcagctggtacagttttagagctagaaatagcaagttaaaataaggctagtccgttatcaacttgaaaaagtggcaccgagtcggtgcggcttgtcgacgacggcggtctccgtcgtcaggatcataccagctgagatttt

SEQ ID NO: 1460 - RNA, 149 nt, synthetic construct
  misc_feature 1..149: note = Synthetic
  source 1..149: mol_type = other RNA
agagtctctcagctggtacagttttagagctagaaatagcaagttaaaataaggctagtccgttatcaacttgaaaaagtggcaccgagtcggtgcggcttgtcgacgacggcggtctccgtcgtcaggatcataccagctgagagact

SEQ ID NO: 1461 - RNA, 151 nt, synthetic construct
  misc_feature 1..151: note = Synthetic
  source 1..151: mol_type = other RNA
agagtctctcagctggtacagttttagagctagaaatagcaagttaaaataaggctagtccgttatcaacttgaaaaagtggcaccgagtcggtgcggcttgtcgacgacggcggtctccgtcgtcaggatcataccagctgagagatttt

SEQ ID NO: 1462 - RNA, 147 nt, synthetic construct
  misc_feature 1..147: note = Synthetic
  source 1..147: mol_type = other RNA
agagtctctcagctggtacagttttagagctagaaatagcaagttaaaataaggctagtccgttatcaacttgaaaaagtggcaccgagtcggtgcatgatcctgacgacggagaccgccgtcgtcgacaagccaccagctgagaga

SEQ ID NO: 1463 - RNA, 151 nt, synthetic construct
  misc_feature 1..151: note = Synthetic
  source 1..151: mol_type = other RNA
agagtctctcagctggtacagttttagagctagaaatagcaagttaaaataaggctagtccgttatcaacttgaaaaagtggcaccgagtcggtgcatgatcctgacgacggagaccgccgtcgtcgacaagccaccagctgagagatttt

SEQ ID NO: 1464 - RNA, 153 nt, synthetic construct
  misc_feature 1..153: note = Synthetic
  source 1..153: mol_type = other RNA
agagtctctcagctggtacagttttagagctagaaatagcaagttaaaataaggctagtccgttatcaacttgaaaaagtggcaccgagtcggtgcggcttgtcgacgacggcggtctccgtcgtcaggatcataccagctgagagacttttt

SEQ ID NO: 1465 - RNA, 155 nt, synthetic construct
  misc_feature 1..155: note = Synthetic
  source 1..155: mol_type = other RNA
agagtctctcagctggtacagttttagagctagaaatagcaagttaaaataaggctagtccgttatcaacttgaaaaagtggcaccgagtcggtgcatgatcctgacgacggagaccgccgtcgtcgacaagccaccagctgagagatttttttt

SEQ ID NO: 1466-1468 - skipped (3 entries)

SEQ ID NO: 1469 - RNA, 152 nt, synthetic construct
  misc_feature 1..152: note = Synthetic
  source 1..152: mol_type = other RNA
agagtctctcagctggtacagttttagagctagaaatagcaagttaaaataaggctagtccgttatcaacttgaaaaagtggcaccgagtcggtgcccgtgacctacatgctcgaagggcgtatgcgccacgaagaccagctgagagatttt

SEQ ID NO: 1470-1473 - skipped (4 entries)

SEQ ID NO: 1474 - RNA, 147 nt, synthetic construct
  misc_feature 1..147: note = Synthetic
  source 1..147: mol_type = other RNA
agagtctctcagctggtacagttttagagctagaaatagcaagttaaaataaggctagtccgttatcaacttgaaaaagtggcaccgagtcggtgcatgatcctgacgacggagaccgccgtcgtcgacaagccaccagctgatttt

SEQ ID NO: 1475 - RNA, 141 nt, synthetic construct
  misc_feature 1..141: note = Synthetic
  source 1..141: mol_type = other RNA
agagtctctcagctggtacagttttagagctagaaatagcaagttaaaataaggctagtccgttatcaacttgaaaaagtggcaccgagtcggtgcgacgacggagaccgccgtcgtcgacaagccaccagctgagatttt

SEQ ID NO: 1476 - RNA, 142 nt, synthetic construct
  misc_feature 1..142: note = Synthetic
  source 1..142: mol_type = other RNA
agagtctctcagctggtacagttttagagctagaaatagcaagttaaaataaggctagtccgttatcaacttgaaaaagtggcaccgagtcggtgcacgacggcggtctccgtcgtcaggatcataccagctgagagatttt

SEQ ID NO: 1477 - RNA, 140 nt, synthetic construct
  misc_feature 1..140: note = Synthetic
  source 1..140: mol_type = other RNA
agagtctctcagctggtacagttttagagctagaaatagcaagttaaaataaggctagtccgttatcaacttgaaaaagtggcaccgagtcggtgcacgacggcggtctccgtcgtcaggatcataccagctgagatttt

SEQ ID NO: 1478 - RNA, 17 nt, synthetic construct
  misc_feature 1..17: note = Synthetic
  source 1..17: mol_type = other RNA
ggtacacggcagggtca

SEQ ID NO: 1479 - RNA, 18 nt, synthetic construct
  misc_feature 1..18: note = Synthetic
  source 1..18: mol_type = other RNA
tggtacacggcagggtca

SEQ ID NO: 1480 - RNA, 19 nt, synthetic construct
  misc_feature 1..19: note = Synthetic
  source 1..19: mol_type = other RNA
ctggtacacggcagggtca

SEQ ID NO: 1481 - RNA, 20 nt, synthetic construct
  misc_feature 1..20: note = Synthetic
  source 1..20: mol_type = other RNA
gctggtacacggcagggtca

SEQ ID NO: 1482 - RNA, 21 nt, synthetic construct
  misc_feature 1..21: note = Synthetic
  source 1..21: mol_type = other RNA
agctggtacacggcagggtca

SEQ ID NO: 1483 - RNA, 22 nt, synthetic construct
  misc_feature 1..22: note = Synthetic
  source 1..22: mol_type = other RNA
cagctggtacacggcagggtca

SEQ ID NO: 1484 - RNA, 10 nt, synthetic construct
  misc_feature 1..10: note = Synthetic
  source 1..10: mol_type = other RNA
ccctgccgtg

SEQ ID NO: 1485-1489 - skipped (5 entries)

SEQ ID NO: 1490 - RNA, 11 nt, synthetic construct
  misc_feature 1..11: note = Synthetic
  source 1..11: mol_type = other RNA
ccctgccgtgt

SEQ ID NO: 1491 - RNA, 12 nt, synthetic construct
  misc_feature 1..12: note = Synthetic
  source 1..12: mol_type = other RNA
ccctgccgtgta

SEQ ID NO: 1492 - RNA, 13 nt, synthetic construct
  misc_feature 1..13: note = Synthetic
  source 1..13: mol_type = other RNA
ccctgccgtgtac

SEQ ID NO: 1493 - RNA, 14 nt, synthetic construct
  misc_feature 1..14: note = Synthetic
  source 1..14: mol_type = other RNA
ccctgccgtgtacc

SEQ ID NO: 1494 - RNA, 15 nt, synthetic construct
  misc_feature 1..15: note = Synthetic
  source 1..15: mol_type = other RNA
ccctgccgtgtacca

SEQ ID NO: 1495 - RNA, 16 nt, synthetic construct
  misc_feature 1..16: note = Synthetic
  source 1..16: mol_type = other RNA
ccctgccgtgtaccag

SEQ ID NO: 1496 - RNA, 17 nt, synthetic construct
  misc_feature 1..17: note = Synthetic
  source 1..17: mol_type = other RNA
ccctgccgtgtaccagc

SEQ ID NO: 1497 - RNA, 18 nt, synthetic construct
  misc_feature 1..18: note = Synthetic
  source 1..18: mol_type = other RNA
ccctgccgtgtaccagct

SEQ ID NO: 1498 - RNA, 19 nt, synthetic construct
  misc_feature 1..19: note = Synthetic
  source 1..19: mol_type = other RNA
ccctgccgtgtaccagctg

SEQ ID NO: 1499 - RNA, 131 nt, synthetic construct
  misc_feature 1..131: note = Synthetic
  source 1..131: mol_type = other RNA
gctggtacacggcagggtcagttttagagctagaaatagcaagttaaaataaggctagtccgttatcaacttgaaaaagtggcaccgagtcggtgcacgacggcggtctccgtcgtcaggatcatccctgc

SEQ ID NO: 1500 - RNA, 133 nt, synthetic construct
  misc_feature 1..133: note = Synthetic
  source 1..133: mol_type = other RNA
gctggtacacggcagggtcagttttagagctagaaatagcaagttaaaataaggctagtccgttatcaacttgaaaaagtggcaccgagtcggtgcgacgacggcggtctccgtcgtcaggatcatccctgcc

SEQ ID NO: 1501 - RNA, 135 nt, synthetic construct
  misc_feature 1..135: note = Synthetic
  source 1..135: mol_type = other RNA
gctggtacacggcagggtcagttttagagctagaaatagcaagttaaaataaggctagtccgttatcaacttgaaaaagtggcaccgagtcggtgcacgacggcggtctccgtcgtcaggatcatccctgccgtg

SEQ ID NO: 1502 - RNA, 135 nt, synthetic construct
  misc_feature 1..135: note = Synthetic
  source 1..135: mol_type = other RNA
gctggtacacggcagggtcagttttagagctagaaatagcaagttaaaataaggctagtccgttatcaacttgaaaaagtggcaccgagtcggtgcgacgacggcggtctccgtcgtcaggatcatccctgccgt

SEQ ID NO: 1503 - RNA, 137 nt, synthetic construct
  misc_feature 1..137: note = Synthetic
  source 1..137: mol_type = other RNA
gctggtacacggcagggtcagttttagagctagaaatagcaagttaaaataaggctagtccgttatcaacttgaaaaagtggcaccgagtcggtgcgacgacggcggtctccgtcgtcaggatcatccctgcctttt

SEQ ID NO: 1504 - RNA, 137 nt, synthetic construct
  misc_feature 1..137: note = Synthetic
  source 1..137: mol_type = other RNA
gctggtacacggcagggtcagttttagagctagaaatagcaagttaaaataaggctagtccgttatcaacttgaaaaagtggcaccgagtcggtgcgacgacggcggtctccgtcgtcaggatcatccctgccgtgt

SEQ ID NO: 1505 - RNA, 139 nt, synthetic construct
  misc_feature 1..139: note = Synthetic
  source 1..139: mol_type = other RNA
gctggtacacggcagggtcagttttagagctagaaatagcaagttaaaataaggctagtccgttatcaacttgaaaaagtggcaccgagtcggtgcgacgacggcggtctccgtcgtcaggatcatccctgccgttttt

SEQ ID NO: 1506 - RNA, 139 nt, synthetic construct
  misc_feature 1..139: note = Synthetic
  source 1..139: mol_type = other RNA
gctggtacacggcagggtcagttttagagctagaaatagcaagttaaaataaggctagtccgttatcaacttgaaaaagtggcaccgagtcggtgcgacgacggcggtctccgtcgtcaggatcatccctgccgtgtac

SEQ ID NO: 1507 - RNA, 140 nt, synthetic construct
  misc_feature 1..140: note = Synthetic
  source 1..140: mol_type = other RNA
gctggtacacggcagggtcagttttagagctagaaatagcaagttaaaataaggctagtccgttatcaacttgaaaaagtggcaccgagtcggtgcggcttgtcgacgacggcggtctccgtcgtcaggatcatccctgc

SEQ ID NO: 1508 - RNA, 141 nt, synthetic construct
  misc_feature 1..141: note = Synthetic
  source 1..141: mol_type = other RNA
gctggtacacggcagggtcagttttagagctagaaatagcaagttaaaataaggctagtccgttatcaacttgaaaaagtggcaccgagtcggtgcgacgacggcggtctccgtcgtcaggatcatccctgccgtgttttt

SEQ ID NO: 1509 - RNA, 141 nt, synthetic construct
  misc_feature 1..141: note = Synthetic
  source 1..141: mol_type = other RNA
gctggtacacggcagggtcagttttagagctagaaatagcaagttaaaataaggctagtccgttatcaacttgaaaaagtggcaccgagtcggtgcggcttgtcgacgacggcggtctccgtcgtcaggatcatccctgcc

SEQ ID NO: 1510 - RNA, 142 nt, synthetic construct
  misc_feature 1..142: note = Synthetic
  source 1..142: mol_type = other RNA
gctggtacacggcagggtcagttttagagctagaaatagcaagttaaaataaggctagtccgttatcaacttgaaaaagtggcaccgagtcggtgcggcttgtcgacgacggcggtctccgtcgtcaggatcatccctgccg

SEQ ID NO: 1511 - RNA, 143 nt, synthetic construct
  misc_feature 1..143: note = Synthetic
  source 1..143: mol_type = other RNA
gctggtacacggcagggtcagttttagagctagaaatagcaagttaaaataaggctagtccgttatcaacttgaaaaagtggcaccgagtcggtgcgacgacggcggtctccgtcgtcaggatcatccctgccgtgtactttt

SEQ ID NO: 1512 - RNA, 143 nt, synthetic construct
  misc_feature 1..143: note = Synthetic
  source 1..143: mol_type = other RNA
gctggtacacggcagggtcagttttagagctagaaatagcaagttaaaataaggctagtccgttatcaacttgaaaaagtggcaccgagtcggtgcggcttgtcgacgacggcggtctccgtcgtcaggatcatccctgccgt

SEQ ID NO: 1513 - RNA, 144 nt, synthetic construct
  misc_feature 1..144: note = Synthetic
  source 1..144: mol_type = other RNA
gctggtacacggcagggtcagttttagagctagaaatagcaagttaaaataaggctagtccgttatcaacttgaaaaagtggcaccgagtcggtgcggcttgtcgacgacggcggtctccgtcgtcaggatcatccctgccgtg

SEQ ID NO: 1514 - RNA, 145 nt, synthetic construct
  misc_feature 1..145: note = Synthetic
  source 1..145: mol_type = other RNA
gctggtacacggcagggtcagttttagagctagaaatagcaagttaaaataaggctagtccgttatcaacttgaaaaagtggcaccgagtcggtgcggcttgtcgacgacggcggtctccgtcgtcaggatcatccctgcctttt

SEQ ID NO: 1515 - RNA, 145 nt, synthetic construct
  misc_feature 1..145: note = Synthetic
  source 1..145: mol_type = other RNA
gctggtacacggcagggtcagttttagagctagaaatagcaagttaaaataaggctagtccgttatcaacttgaaaaagtggcaccgagtcggtgcggcttgtcgacgacggcggtctccgtcgtcaggatcatccctgccgtgt

SEQ ID NO: 1516 - RNA, 146 nt, synthetic construct
  misc_feature 1..146: note = Synthetic
  source 1..146: mol_type = other RNA
gctggtacacggcagggtcagttttagagctagaaatagcaagttaaaataaggctagtccgttatcaacttgaaaaagtggcaccgagtcggtgcggcttgtcgacgacggcggtctccgtcgtcaggatcatccctgccgtttt

SEQ ID NO: 1517 - RNA, 146 nt, synthetic construct
  misc_feature 1..146: note = Synthetic
  source 1..146: mol_type = other RNA
gctggtacacggcagggtcagttttagagctagaaatagcaagttaaaataaggctagtccgttatcaacttgaaaaagtggcaccgagtcggtgcggcttgtcgacgacggcggtctccgtcgtcaggatcatccctgccgtgta

SEQ ID NO: 1518 - RNA, 147 nt, synthetic construct
  misc_feature 1..147: note = Synthetic
  source 1..147: mol_type = other RNA
gctggtacacggcagggtcagttttagagctagaaatagcaagttaaaataaggctagtccgttatcaacttgaaaaagtggcaccgagtcggtgcggcttgtcgacgacggcggtctccgtcgtcaggatcatccctgccgttttt

SEQ ID NO: 1519 - RNA, 147 nt, synthetic construct
  misc_feature 1..147: note = Synthetic
  source 1..147: mol_type = other RNA
gctggtacacggcagggtcagttttagagctagaaatagcaagttaaaataaggctagtccgttatcaacttgaaaaagtggcaccgagtcggtgcggcttgtcgacgacggcggtctccgtcgtcaggatcatccctgccgtgtac

SEQ ID NO: 1520 - RNA, 148 nt, synthetic construct
  misc_feature 1..148: note = Synthetic
  source 1..148: mol_type = other RNA
gctggtacacggcagggtcagttttagagctagaaatagcaagttaaaataaggctagtccgttatcaacttgaaaaagtggcaccgagtcggtgcggcttgtcgacgacggcggtctccgtcgtcaggatcatccctgccgtgtttt

SEQ ID NO: 1521 - RNA, 149 nt, synthetic construct
  misc_feature 1..149: note = Synthetic
  source 1..149: mol_type = other RNA
gctggtacacggcagggtcagttttagagctagaaatagcaagttaaaataaggctagtccgttatcaacttgaaaaagtggcaccgagtcggtgcggcttgtcgacgacggcggtctccgtcgtcaggatcatccctgccgtgttttt

SEQ ID NO: 1522 - RNA, 150 nt, synthetic construct
  misc_feature 1..150: note = Synthetic
  source 1..150: mol_type = other RNA
gctggtacacggcagggtcagttttagagctagaaatagcaagttaaaataaggctagtccgttatcaacttgaaaaagtggcaccgagtcggtgcggcttgtcgacgacggcggtctccgtcgtcaggatcatccctgccgtgtatttt

SEQ ID NO: 1523 - RNA, 151 nt, synthetic construct
  misc_feature 1..151: note = Synthetic
  source 1..151: mol_type = other RNA
gctggtacacggcagggtcagttttagagctagaaatagcaagttaaaataaggctagtccgttatcaacttgaaaaagtggcaccgagtcggtgcggcttgtcgacgacggcggtctccgtcgtcaggatcatccctgccgtgtactttt

SEQ ID NO: 1524 - RNA, 145 nt, synthetic construct
  misc_feature 1..145: note = Synthetic
  source 1..145: mol_type = other RNA
gctggtacacggcagggtcagttttagagctagaaatagcaagttaaaataaggctagtccgttatcaacttgaaaaagtggcaccgagtcggtgcatgatcctgacgacggagaccgccgtcgtcgacaagccccctgcctttt

SEQ ID NO: 1525 - RNA, 137 nt, synthetic construct
  misc_feature 1..137: note = Synthetic
  source 1..137: mol_type = other RNA
gctggtacacggcagggtcagttttagagctagaaatagcaagttaaaataaggctagtccgttatcaacttgaaaaagtggcaccgagtcggtgcgacgacggagaccgccgtcgtcgacaagccccctgcctttt

SEQ ID NO: 1526 - RNA, 139 nt, synthetic construct
  misc_feature 1..139: note = Synthetic
  source 1..139: mol_type = other RNA
gctggtacacggcagggtcagttttagagctagaaatagcaagttaaaataaggctagtccgttatcaacttgaaaaagtggcaccgagtcggtgcgacgacggagaccgccgtcgtcgacaagccccctgccgttttt

SEQ ID NO: 1527 - RNA, 137 nt, synthetic construct
  misc_feature 1..137: note = Synthetic
  source 1..137: mol_type = other RNA
gctggtacacggcagggtcagttttagagctagaaatagcaagttaaaataaggctagtccgttatcaacttgaaaaagtggcaccgagtcggtgcacgacggcggtctccgtcgtcaggatcatccctgccgtttt

SEQ ID NO: 1528 - RNA, 133 nt, synthetic construct
  misc_feature 1..133: note = Synthetic
  source 1..133: mol_type = other RNA
gctggtacacggcagggtcagttttagagctagaaatagcaagttaaaataaggctagtccgttatcaacttgaaaaagtggcaccgagtcggtgcacgacggcggtctccgtcgtcaggatcatccctgccg

SEQ ID NO: 1529 - RNA, 17 nt, synthetic construct
  misc_feature 1..17: note = Synthetic
  source 1..17: mol_type = other RNA
ctcagctggtacacggc

SEQ ID NO: 1530 - RNA, 18 nt, synthetic construct
  misc_feature 1..18: note = Synthetic
  source 1..18: mol_type = other RNA
tctcagctggtacacggc

SEQ ID NO: 1531 - RNA, 19 nt, synthetic construct
  misc_feature 1..19: note = Synthetic
  source 1..19: mol_type = other RNA
ctctcagctggtacacggc

SEQ ID NO: 1532 - RNA, 20 nt, synthetic construct
  misc_feature 1..20: note = Synthetic
  source 1..20: mol_type = other RNA
tctctcagctggtacacggc

SEQ ID NO: 1533 - RNA, 21 nt, synthetic construct
  misc_feature 1..21: note = Synthetic
  source 1..21: mol_type = other RNA
gtctctcagctggtacacggc

SEQ ID NO: 1534 - RNA, 22 nt, synthetic construct
  misc_feature 1..22: note = Synthetic
  source 1..22: mol_type = other RNA
agtctctcagctggtacacggc

SEQ ID NO: 1535 - RNA, 10 nt, synthetic construct
  misc_feature 1..10: note = Synthetic
  source 1..10: mol_type = other RNA
gtgtaccagc

SEQ ID NO: 1536-1540 - skipped (5 entries)

SEQ ID NO: 1541 - RNA, 11 nt, synthetic construct
  misc_feature 1..11: note = Synthetic
  source 1..11: mol_type = other RNA
gtgtaccagct

SEQ ID NO: 1542 - RNA, 12 nt, synthetic construct
  misc_feature 1..12: note = Synthetic
  source 1..12: mol_type = other RNA
gtgtaccagctg

SEQ ID NO: 1543 - RNA, 13 nt, synthetic construct
  misc_feature 1..13: note = Synthetic
  source 1..13: mol_type = other RNA
gtgtaccagctga

SEQ ID NO: 1544 - RNA, 14 nt, synthetic construct
  misc_feature 1..14: note = Synthetic
  source 1..14: mol_type = other RNA
gtgtaccagctgag

SEQ ID NO: 1545 - RNA, 15 nt, synthetic construct
  misc_feature 1..15: note = Synthetic
  source 1..15: mol_type = other RNA
gtgtaccagctgaga

SEQ ID NO: 1546 - RNA, 16 nt, synthetic construct
  misc_feature 1..16: note = Synthetic
  source 1..16: mol_type = other RNA
gtgtaccagctgagag

SEQ ID NO: 1547 - RNA, 17 nt, synthetic construct
  misc_feature 1..17: note = Synthetic
  source 1..17: mol_type = other RNA
gtgtaccagctgagaga

SEQ ID NO: 1548 - RNA, 18 nt, synthetic construct
  misc_feature 1..18: note = Synthetic
  source 1..18: mol_type = other RNA
gtgtaccagctgagagac

SEQ ID NO: 1549 - RNA, 19 nt, synthetic construct
  misc_feature 1..19: note = Synthetic
  source 1..19: mol_type = other RNA
gtgtaccagctgagagact

SEQ ID NO: 1550 - RNA, 137 nt, synthetic construct
  misc_feature 1..137: note = Synthetic
  source 1..137: mol_type = other RNA
tctctcagctggtacacggcgttttagagctagaaatagcaagttaaaataaggctagtccgttatcaacttgaaaaagtggcaccgagtcggtgcgacgacggcggtctccgtcgtcaggatcatgtgtaccagct

SEQ ID NO: 1551 - RNA, 139 nt, synthetic construct
  misc_feature 1..139: note = Synthetic
  source 1..139: mol_type = other RNA
tctctcagctggtacacggcgttttagagctagaaatagcaagttaaaataaggctagtccgttatcaacttgaaaaagtggcaccgagtcggtgcgacgacggcggtctccgtcgtcaggatcatgtgtaccagctga

SEQ ID NO: 1552 - RNA, 139 nt, synthetic construct
  misc_feature 1..139: note = Synthetic
  source 1..139: mol_type = other RNA
tctctcagctggtacacggcgttttagagctagaaatagcaagttaaaataaggctagtccgttatcaacttgaaaaagtggcaccgagtcggtgcgacgacggagaccgccgtcgtcgacaagccgtgtaccagctga

SEQ ID NO: 1553 - RNA, 141 nt, synthetic construct
  misc_feature 1..141: note = Synthetic
  source 1..141: mol_type = other RNA
tctctcagctggtacacggcgttttagagctagaaatagcaagttaaaataaggctagtccgttatcaacttgaaaaagtggcaccgagtcggtgcgacgacggcggtctccgtcgtcaggatcatgtgtaccagcttttt

SEQ ID NO: 1554 - RNA, 141 nt, synthetic construct
  misc_feature 1..141: note = Synthetic
  source 1..141: mol_type = other RNA
tctctcagctggtacacggcgttttagagctagaaatagcaagttaaaataaggctagtccgttatcaacttgaaaaagtggcaccgagtcggtgcgacgacggcggtctccgtcgtcaggatcatgtgtaccagctgaga

SEQ ID NO: 1555 - RNA, 143 nt, synthetic construct
  misc_feature 1..143: note = Synthetic
  source 1..143: mol_type = other RNA
tctctcagctggtacacggcgttttagagctagaaatagcaagttaaaataaggctagtccgttatcaacttgaaaaagtggcaccgagtcggtgcgacgacggcggtctccgtcgtcaggatcatgtgtaccagctgatttt

SEQ ID NO: 1556 - RNA, 143 nt, synthetic construct
  misc_feature 1..143: note = Synthetic
  source 1..143: mol_type = other RNA
tctctcagctggtacacggcgttttagagctagaaatagcaagttaaaataaggctagtccgttatcaacttgaaaaagtggcaccgagtcggtgcgacgacggagaccgccgtcgtcgacaagccgtgtaccagctgatttt

SEQ ID NO: 1557 - RNA, 143 nt, synthetic construct
  misc_feature 1..143: note = Synthetic
  source 1..143: mol_type = other RNA
tctctcagctggtacacggcgttttagagctagaaatagcaagttaaaataaggctagtccgttatcaacttgaaaaagtggcaccgagtcggtgcggcttgtcgacgacggcggtctccgtcgtcaggatcatgtgtaccag

SEQ ID NO: 1558 - RNA, 143 nt, synthetic construct
  misc_feature 1..143: note = Synthetic
  source 1..143: mol_type = other RNA
tctctcagctggtacacggcgttttagagctagaaatagcaagttaaaataaggctagtccgttatcaacttgaaaaagtggcaccgagtcggtgcgacgacggcggtctccgtcgtcaggatcatgtgtaccagctgagaga

SEQ ID NO: 1559 - RNA, 145 nt, synthetic construct
  misc_feature 1..145: note = Synthetic
  source 1..145: mol_type = other RNA
tctctcagctggtacacggcgttttagagctagaaatagcaagttaaaataaggctagtccgttatcaacttgaaaaagtggcaccgagtcggtgcgacgacggcggtctccgtcgtcaggatcatgtgtaccagctgagatttt

SEQ ID NO: 1560 - RNA, 145 nt, synthetic construct
  misc_feature 1..145: note = Synthetic
  source 1..145: mol_type = other RNA
tctctcagctggtacacggcgttttagagctagaaatagcaagttaaaataaggctagtccgttatcaacttgaaaaagtggcaccgagtcggtgcggcttgtcgacgacggcggtctccgtcgtcaggatcatgtgtaccagct

SEQ ID NO: 1561 - RNA, 147 nt, synthetic construct
  misc_feature 1..147: note = Synthetic
  source 1..147: mol_type = other RNA
tctctcagctggtacacggcgttttagagctagaaatagcaagttaaaataaggctagtccgttatcaacttgaaaaagtggcaccgagtcggtgcggcttgtcgacgacggcggtctccgtcgtcaggatcatgtgtaccagtttt

SEQ ID NO: 1562 - RNA, 147 nt, synthetic construct
  misc_feature 1..147: note = Synthetic
  source 1..147: mol_type = other RNA
tctctcagctggtacacggcgttttagagctagaaatagcaagttaaaataaggctagtccgttatcaacttgaaaaagtggcaccgagtcggtgcgacgacggcggtctccgtcgtcaggatcatgtgtaccagctgagagatttt

SEQ ID NO: 1563 - RNA, 147 nt, synthetic construct
  misc_feature 1..147: note = Synthetic
  source 1..147: mol_type = other RNA
tctctcagctggtacacggcgttttagagctagaaatagcaagttaaaataaggctagtccgttatcaacttgaaaaagtggcaccgagtcggtgcgacgacggcggtctccgtcgtcaggatcatgtgtaccagctgatttttttt

SEQ ID NO: 1564 - RNA, 147 nt, synthetic construct
  misc_feature 1..147: note = Synthetic
  source 1..147: mol_type = other RNA
tctctcagctggtacacggcgttttagagctagaaatagcaagttaaaataaggctagtccgttatcaacttgaaaaagtggcaccgagtcggtgcggcttgtcgacgacggcggtctccgtcgtcaggatcatgtgtaccagctga

SEQ ID NO: 1565 - RNA, 147 nt, synthetic construct
  misc_feature 1..147: note = Synthetic
  source 1..147: mol_type = other RNA
tctctcagctggtacacggcgttttagagctagaaatagcaagttaaaataaggctagtccgttatcaacttgaaaaagtggcaccgagtcggtgcatgatcctgacgacggagaccgccgtcgtcgacaagccgtgtaccagctga

SEQ ID NO: 1566 - RNA, 149 nt, synthetic construct
  misc_feature 1..149: note = Synthetic
  source 1..149: mol_type = other RNA
tctctcagctggtacacggcgttttagagctagaaatagcaagttaaaataaggctagtccgttatcaacttgaaaaagtggcaccgagtcggtgcggcttgtcgacgacggcggtctccgtcgtcaggatcatgtgtaccagcttttt

SEQ ID NO: 1567 - RNA, 149 nt, synthetic construct
  misc_feature 1..149: note = Synthetic
  source 1..149: mol_type = other RNA
tctctcagctggtacacggcgttttagagctagaaatagcaagttaaaataaggctagtccgttatcaacttgaaaaagtggcaccgagtcggtgcggcttgtcgacgacggcggtctccgtcgtcaggatcatgtgtaccagctgaga

SEQ ID NO: 1568 - RNA, 151 nt, synthetic construct
  misc_feature 1..151: note = Synthetic
  source 1..151: mol_type = other RNA
tctctcagctggtacacggcgttttagagctagaaatagcaagttaaaataaggctagtccgttatcaacttgaaaaagtggcaccgagtcggtgcggcttgtcgacgacggcggtctccgtcgtcaggatcatgtgtaccagctgatttt

SEQ ID NO: 1569 - RNA, 151 nt, synthetic construct
  misc_feature 1..151: note = Synthetic
  source 1..151: mol_type = other RNA
tctctcagctggtacacggcgttttagagctagaaatagcaagttaaaataaggctagtccgttatcaacttgaaaaagtggcaccgagtcggtgcatgatcctgacgacggagaccgccgtcgtcgacaagccgtgtaccagctgatttt

SEQ ID NO: 1570 - RNA, 151 nt, synthetic construct
  misc_feature 1..151: note = Synthetic
  source 1..151: mol_type = other RNA
tctctcagctggtacacggcgttttagagctagaaatagcaagttaaaataaggctagtccgttatcaacttgaaaaagtggcaccgagtcggtgcggcttgtcgacgacggcggtctccgtcgtcaggatcatgtgtaccagctgagaga

SEQ ID NO: 1571 - RNA, 153 nt, synthetic construct
  misc_feature 1..153: note = Synthetic
  source 1..153: mol_type = other RNA
tctctcagctggtacacggcgttttagagctagaaatagcaagttaaaataaggctagtccgttatcaacttgaaaaagtggcaccgagtcggtgcggcttgtcgacgacggcggtctccgtcgtcaggatcatgtgtaccagctgagatttt

SEQ ID NO: 1572 - RNA, 155 nt, synthetic construct
  misc_feature 1..155: note = Synthetic
  source 1..155: mol_type = other RNA
tctctcagctggtacacggcgttttagagctagaaatagcaagttaaaataaggctagtccgttatcaacttgaaaaagtggcaccgagtcggtgcggcttgtcgacgacggcggtctccgtcgtcaggatcatgtgtaccagctgagagatttt

SEQ ID NO: 1573 - RNA, 141 nt, synthetic construct
  misc_feature 1..141: note = Synthetic
  source 1..141: mol_type = other RNA
tctctcagctggtacacggcgttttagagctagaaatagcaagttaaaataaggctagtccgttatcaacttgaaaaagtggcaccgagtcggtgcgacgacggagaccgccgtcgtcgacaagccgtgtaccagcttttt

SEQ ID NO: 1574 - RNA, 142 nt, synthetic construct
  misc_feature 1..142: note = Synthetic
  source 1..142: mol_type = other RNA
tctctcagctggtacacggcgttttagagctagaaatagcaagttaaaataaggctagtccgttatcaacttgaaaaagtggcaccgagtcggtgcacgacggcggtctccgtcgtcaggatcatgtgtaccagctgatttt

SEQ ID NO: 1575 - DNA, 29 bp, synthetic construct
  misc_feature 1..29: note = Synthetic
  source 1..29: mol_type = other DNA
acgacggagaccgccgtcgtcgacaagcc

SEQ ID NO: 1576 - DNA, 30 bp, synthetic construct
  misc_feature 1..30: note = Synthetic
  source 1..30: mol_type = other DNA
gacgacggagaccgccgtcgtcgacaagcc

SEQ ID NO: 1577 - DNA, 38 bp, synthetic construct
  misc_feature 1..38: note = Synthetic
  source 1..38: mol_type = other DNA
atgatcctgacgacggagaccgccgtcgtcgacaagcc

SEQ ID NO: 1578-1584 - skipped (7 entries)

SEQ ID NO: 1585 - DNA, 29 bp, synthetic construct
  misc_feature 1..29: note = Synthetic
  source 1..29: mol_type = other DNA
acgacggcggtctccgtcgtcaggatcat

SEQ ID NO: 1586 - DNA, 30 bp, synthetic construct
  misc_feature 1..30: note = Synthetic
  source 1..30: mol_type = other DNA
gacgacggcggtctccgtcgtcaggatcat

SEQ ID NO: 1587 - DNA, 38 bp, synthetic construct
  misc_feature 1..38: note = Synthetic
  source 1..38: mol_type = other DNA
ggcttgtcgacgacggcggtctccgtcgtcaggatcat

SEQ ID NO: 1588 - skipped

SEQ ID NO: 1589 - DNA, 30 bp, synthetic construct; identical to SEQ ID NO: 1576
  misc_feature 1..30: note = Synthetic
  source 1..30: mol_type = other DNA

SEQ ID NO: 1590 - DNA, 38 bp, synthetic construct; identical to SEQ ID NO: 1587
  misc_feature 1..38: note = Synthetic
  source 1..38: mol_type = other DNA

SEQ ID NO: 1591 - DNA, 48 bp, synthetic construct
  misc_feature 1..48: note = Synthetic
  source 1..48: mol_type = other DNA
ggtttgtctggtcaaccaccgcggtctcagtggtgtacggtacaaacc

SEQ ID NO: 1592 - DNA, 38 bp, synthetic construct
  misc_feature 1..38: note = Synthetic
  source 1..38: mol_type = other DNA
ggcttgtcgacgacggcggactccgtcgtcaggatcat

SEQ ID NO: 1593 - DNA, 48 bp, synthetic construct
  misc_feature 1..48: note = Synthetic
  source 1..48: mol_type = other DNA
ggtttgtctggtcaaccaccgcggactcagtggtgtacggtacaaacc

SEQ ID NO: 1594-1597 - skipped (4 entries)

SEQ ID NO: 1598 - DNA, 112 bp, synthetic construct
  misc_feature 1..112: note = Synthetic
  source 1..112: mol_type = other DNA
ttccgacgcagtttccgacgagtacgaggacgaggacagacgtgcctaccggcaaggtcaagtggttcaacagcgagaagggcttcggctttctctcccgcgacgacggcgg

SEQ ID NO: 1599 - DNA, 112 bp, synthetic construct
  misc_feature 1..112: note = Synthetic
  source 1..112: mol_type = other DNA
tagtgacgtctgtccgcgcagtgatcgagggagtgtgtgctttgccgactggcaaggtcaagccggtctgctaggcacagagagccggtacagtcctccccatgcaacccaa

SEQ ID NO: 1600 - DNA, 115 bp, synthetic construct
  misc_feature 1..115: note = Synthetic
  source 1..115: mol_type = other DNA
gtgacccgttccgccgtcgagaacgccacctccgtggcgcgcatggtgctcaccaccgagagcgccgtggtcgacaagccggccgaggaagagcccgcgaacggccaccacggcc

SEQ ID NO: 1601 - DNA, 115 bp, synthetic construct
  misc_feature 1..115: note = Synthetic
  source 1..115: mol_type = other DNA
tgattacgatcagtgccctgggaggcgattccggcatggcttatatccaacaccaccgagagcgctgttgtcgagcgtgtaagccaggacgaggacgagcacgcccacgggcacg

SEQ ID NO: 1602 - DNA, 113 bp, synthetic construct
  misc_feature 1..113: note = Synthetic
  source 1..113: mol_type = other DNA
tttgcatttaaaatcggagcatcatttttcaacagaaacgactatgagcgcaatgacccttgatttacctcgccgctttccgtggccaacgctgctgtccgtggctatccacg

SEQ ID NO: 1603 - DNA, 113 bp, synthetic construct
  misc_feature 1..113: note = Synthetic
  source 1..113: mol_type = other DNA
agaaccttgaaaaactatggcttatgctacctcgccgaatagctcaaatacaatgacccttgaatataggctattcgggttttgaaggtatctggtttttattcacatcacaa

SEQ ID NO: 1604 - DNA, 117 bp, synthetic construct
  misc_feature 1..117: note = Synthetic
  source 1..117: mol_type = other DNA
cgaaatggttggcgttgaggtcaatgattaatgtgtatagggttaacatttaaatcagtacaatcgtagacgctctacactattttctgtgtataaaaatatcgagaataaacgctt

SEQ ID NO: 1605 - DNA, 117 bp, synthetic construct
  misc_feature 1..117: note = Synthetic
  source 1..117: mol_type = other DNA
gctggtcgaggagttaatgaagatctccaacatgttcggctacggtgaggtaaatcagtacaatcgtcactcgaccctaatgtctgcctataaaaacatcaaagatgaacatttccg

SEQ ID NO: 1606 - DNA, 38 bp, synthetic construct
  misc_feature 1..38: note = Synthetic
  source 1..38: mol_type = other DNA
gatatggggaagtgaatcagtacaaccgccacagtacc

SEQ ID NO: 1607 - DNA, 57 bp, synthetic construct
  misc_feature 1..57: note = Synthetic
  source 1..57: mol_type = other DNA
ttcgggtgctgggttgttgtctctggacagtgatccatgggaaactactcagcacca

SEQ ID NO: 1608 - DNA, 50 bp, synthetic construct
  misc_feature 1..50: note = Synthetic
  source 1..50: mol_type = other DNA
attgttgttgtttttccagatccagttggtcctgtaaatataagcaatcc

SEQ ID NO: 1609 - DNA, 50 bp, synthetic construct
  misc_feature 1..50: note = Synthetic
  source 1..50: mol_type = other DNA
ggttgtatttgtagaacttgaccagttgttttagtaacataaatacaact

SEQ ID NO: 1610 - DNA, 50 bp, synthetic construct
  misc_feature 1..50: note = Synthetic
  source 1..50: mol_type = other DNA
cattatatgtttttacaatccgggccgccatactgtaagaacatataatg

SEQ ID NO: 1611 - DNA, 38 bp, synthetic construct; identical to SEQ ID NO: 1606
  misc_feature 1..38: note = Synthetic
  source 1..38: mol_type = other DNA

SEQ ID NO: 1612 - DNA, 50 bp, synthetic construct
  misc_feature 1..50: note = Synthetic
  source 1..50: mol_type = other DNA
cgttatagggtattgcagtaccgaccgccatactgtaataccctataacg

SEQ ID NO: 1613 - DNA, 50 bp, synthetic construct
  misc_feature 1..50: note = Synthetic
  source 1..50: mol_type = other DNA
gatgcactgagctcaccgtccggaccgccatactgacttatgatataaga

SEQ ID NO: 1614-1615 - skipped (2 entries)

SEQ ID NO: 1616 - DNA, 57 bp, synthetic construct
  misc_feature 1..57: note = Synthetic
  variation 34..35: note = n is a, c, g, or t
  source 1..57: mol_type = other DNA
acactctttccctacacgacgctcttccgatctnncttgtggaaaggacgaaacacc

SEQ ID NO: 1617 - DNA, 58 bp, synthetic construct
  misc_feature 1..58: note = Synthetic
  variation 34..36: note = n is a, c, g, or t
  source 1..58: mol_type = other DNA
acactctttccctacacgacgctcttccgatctnnncttgtggaaaggacgaaacacc

SEQ ID NO: 1618 - DNA, 59 bp, synthetic construct
  misc_feature 1..59: note = Synthetic
  variation 34..37: note = n is a, c, g, or t
  source 1..59: mol_type = other DNA
acactctttccctacacgacgctcttccgatctnnnncttgtggaaaggacgaaacacc

SEQ ID NO: 1619 - DNA, 60 bp, synthetic construct
  misc_feature 1..60: note = Synthetic
  variation 34..38: note = n is a, c, g, or t
  source 1..60: mol_type = other DNA
acactctttccctacacgacgctcttccgatctnnnnncttgtggaaaggacgaaacacc

SEQ ID NO: 1620 - DNA, 56 bp, synthetic construct
  misc_feature 1..56: note = Synthetic
  variation 30: note = n is a, c, g, or t
  source 1..56: mol_type = other DNA
tggagttcagacgtgtgctcttccgatctnggacagcagagatccagtttatcgat

SEQ ID NO: 1621 - DNA, 57 bp, synthetic construct
  misc_feature 1..57: note = Synthetic
  variation 30..31: note = n is a, c, g, or t
  source 1..57: mol_type = other DNA
tggagttcagacgtgtgctcttccgatctnnggacagcagagatccagtttatcgat

SEQ ID NO: 1622 - DNA, 58 bp, synthetic construct
  misc_feature 1..58: note = Synthetic
  variation 30..32: note = n is a, c, g, or t
  source 1..58: mol_type = other DNA
tggagttcagacgtgtgctcttccgatctnnnggacagcagagatccagtttatcgat

SEQ ID NO: 1623 - DNA, 131 bp, synthetic construct
  misc_feature 1..131: note = Synthetic
  source 1..131: mol_type = other DNA
actcacgctggatagcctccgtttaagagctagaaatagcaagtttaaataaggctagtccgttatcagcgtgaaaacgcggcaccgagtcggtgcctggcctgtaataagaggctatccagcgtgatttt

SEQ ID NO: 1624 - DNA, 100 bp, synthetic construct
  misc_feature 1..100: note = Synthetic
  source 1..100: mol_type = other DNA
ggccgagatgtctcgctccggttttagagctagaaatagcaagttaaaataaggctagtccgttatcaacttgaaaaagtggcaccgagtcggtgctttt

SEQ ID NO: 1625 - DNA, 100 bp, synthetic construct
  misc_feature 1..100: note = Synthetic
  source 1..100: mol_type = other DNA
tcctgaagctgacagcattcgttttagagctagaaatagcaagttaaaataaggctagtccgttatcaacttgaaaaagtggcaccgagtcggtgctttt

SEQ ID NO: 1626 - DNA, 100 bp, synthetic construct
  misc_feature 1..100: note = Synthetic
  source 1..100: mol_type = other DNA
ttcctgaagctgacagcattgttttagagctagaaatagcaagttaaaataaggctagtccgttatcaacttgaaaaagtggcaccgagtcggtgctttt

SEQ ID NO: 1627 - DNA, 100 bp, synthetic construct
  misc_feature 1..100: note = Synthetic
  source 1..100: mol_type = other DNA
tactctctctttctggctgggttttagagctagaaatagcaagttaaaataaggctagtccgttatcaacttgaaaaagtggcaccgagtcggtgctttt

SEQ ID NO: 1628 - DNA, 100 bp, synthetic construct
  misc_feature 1..100: note = Synthetic
  source 1..100: mol_type = other DNA
ctctctctttctgggcctgggttttagagctagaaatagcaagttaaaataaggctagtccgttatcaacttgaaaaagtggcaccgagtcggtgctttt

SEQ ID NO: 1629 - DNA, 43 bp, synthetic construct
  misc_feature 1..43: note = Synthetic
  source 1..43: mol_type = other DNA
ggcttgtcgacgacggcggtctcagtggtgtacggtacaaacc

SEQ ID NO: 1630 - DNA, 43 bp, synthetic construct
  misc_feature 1..43: note = Synthetic
  source 1..43: mol_type = other DNA
ggtttgtctggtcaaccaccgcggtctccgtcgtcaggatcat

SEQ ID NO: 1631 - protein, 500 aa, synthetic construct [sequence omitted]

SEQ ID NO: 1632 - protein, 555 aa, synthetic construct
  REGION 1..555: note = Synthetic
MQPNLRYLACLRLSADSDGSTSIEWQRGVIRHHVSSPHLSGVLVGEAEDTDVSGSLSPFKRPKLGKWLTAKADEFDVIIAAKMDRLTRRSMHFNELLEWAQQNGKFIVCVEEGFDLSTPQGKMMARMTAVFAEAEWDTIQARILNGVQTRLENRSWLVGAPPTGYRIKTVEGGKRKILEIDQDFYPYVEEIFRRIREGQSTHRIARDFNGRSVLTWGDHLRKLKGEEPKGTQWQATIINKFIRSSWVPGLYTYKGEAVLDDQGDPVILPETPLATMDEWTDLVDRIKPAPKPEGATGGSRNSAKSLLSGVAHCGECGAPFTSLMDSGYKRKDGTKVPGHRRYRCSNKFKGGDCKNGSYVRADVLDSWVDQAIRDSIGQEDMYERAGKGPSQARELQETKARLAKLEADYESGKYDGEGQDESYWRMNKNLSAKVAHLAKQEAERANPTFKATGKKYGEVWEAKDQEDRRDFLRTYGVKVFVWGEGADKKDRGYAMNLGDIKTMAEELFPNRDRARFKLVHTHNAPEGYLSKIGIAVGLLKYGHPLEVKLRSPENS

SEQ ID NO: 1633 - protein, 605 aa, synthetic construct
  REGION 1..605: note = Synthetic
MPESPPRALIVIRLSKVTDATTSPERQLAECRAICEKRGYEVVGVAEDLDVSGAVDPFDRKKRPHLARWLHGEHLDDNGEPVPFEVIVVYRVDRLTRSVRHLQKLVAWADDHKKLVVSATEAHFDTSLPFSAVLIALIGTVAEMELAGISERNASAARHNIQAGRYRGSTPPWGYVPSNDTGEWRLVRDKEQADVINEVARRVIEGEPLQKIAHDLTRRGILTPKDNFAKQRGREIKGREWSVTQLKRSLLSEAMLGHAVSGGAAVRNDDGSPVVRSEPILSREIYDRVAAELSSRAKRGEPNKRTSSLLLGVISCGNPCLHKQQGHECPEGCSGTCDEPVYKFNGGSHSQFPRYRCRTMTRAYKCGNRTIRADQADAQVERTILALLGSSERLERVWDAGEDHSAELADINDELVDLTSQLGVGAFRAGTPQRAKLDARIASLAERQAQLSSEAVVPAGWKLLPTGELFGDWWSRQDLTARNVWLRSMGVRARFKRDDKTLYIDLGNLNDLISGLKPGGTAQRVRGGLQAMERNGIQGMVFSDADSEVMPAPAAGYMWIQPVEGVWVYTSEALLAAAAERQALRREKIEDEFAYGPGDFDEDWD

SEQ ID NO: 1634 - protein, 523 aa, synthetic construct
  REGION 1..523: note = Synthetic
MRQVITYLRFSSKPQERGDSIRRQKGLFERWLKDNPDAKVVDEFSDEGASAYHGHHLKGDFGRMLQNIQDGKYLSGQTVLLVESETRLNRQKARNTENLVDLITGKGVDVICLESGKIYTSTNIDDLDTSIQLKIAAHIAHQQSKEKSIKVSAAWEHRAQLALEGKQQLTKNVPGWIDPDTRKLNEHSSTVVTIFDLLLSGESLHNIARYLQANNIKSFSRREKANGFSVHSVRTILRSESTVGTLAASKRNDRPAIPNYYEPAIDVATFNKAQEILSKNRVGRAPASDNPITINLFKGIIRCQCGASVHPTGVKATYQGVYRCNNVPDGRCNVPTIKRKPFDKWMLDNIVGFLERDDGNNTDKRKAEIEYQISLVTSKLKKATTLLLELDDVTELKEQVKELNIQRSNLQSELDELNQRETLSDKPLHHLSEIDLTTKAGRVEAQLILSKFVQSIELQREMIIITLRNGTVIGKSRDLSPVLSQDLMKQVVSSPSPTDIDMFSVITSDEEFRKSGKQVTKRS

SEQ ID NO: 1635 - protein, 525 aa, synthetic construct
  REGION 1..525: note = Synthetic
MPSAFSYVRFSSGKQAKGSSEHRQRAMLGQWLEQHPSFTLSDLRFEDLGRSGFSGEHLDHGLGQLLAAIDSGAIKSGDVILVEAVDRIGRLEPLEMLPLFSRIVKAGVSVITLEDGHVYDRSSVNETSLFLLVAKIQQAHEYSNRLSRRINASYTARREKAKAGLGIKRETPVWLTTDGQLVPHVAPHIAQAFQDYADGLGERRICRKLRESGLEEFSKTNATTVRRWLKNRTAIGYWNDIPDVYPHVVDPALFYQVQQRLDAPKVDRAKPSAHYLTGLVKCAVCGRNYNYKQRKHTDPAMLCTSRARLAGEGCSNSKTYPVIVLDQVRKLTSLPFLQHAMESASSQADPSSQRLAVIDGEIGELSRKISEATKALLVLGFTPEIQESLEQLKTAREALEEERATLLLPQAEKLTTAQLEAFSNGLLDDEPMKLNHVLQTAGYSMVVHPDGSIDVDGKRFVYEGASRKEKVYKLRLIGEDKQWSLPILTPQMATYKSLFMAAVRLPGDPSEEELRRFEEAKHSER

SEQ ID NO: 1636 - protein, 515 aa, synthetic construct
  REGION 1..515: note = Synthetic
MSRPTGLTIDIYLRKSRKDLEEEKKASESGETYDTLERHRRTLFAVAKKERHNIANIYEEVVSGESVSERPQIQAMLRNLETSHIEGVLVMDLDRLGRGDMLDQGLLDRAFRYSGAKILTPTEVYDPESETWELVFGIKSLVAREELKAITRRMQRGRVASAGEGKSISKVPPYGYLRDENLRLYPDPETAWVVKKMFEMMRDGHGRIAVAQELDKLGIKPPNDKRRSWAPSSITAIIKNEVYLGTIIWGQVKYSKRNGKYKKTKLPRSKWTIKENAHEPIVSRELFEAANRAHTGRWRPSTNATKTLSNPLAGVLKCDVCGFTMLYQPRPNRPNDFIRCTQPTCQAVQKGATLALVEQHILDGLKQFAQELELQTEVPELDNDKDIAVKKSLVGNKQEEIAQLETQKSKLHDLLERGIYDVDTFLERQQNLNNRINGLQDDIRNIESEIKKEEVRNSSVLNLLPQLQTVISEYENADTESKNRLLKSVLEKATYLRKKEWTKRDQFIIQLYPKI

SEQ ID NO: 1637 - protein, 528 aa, synthetic construct
  REGION 1..528: note = Synthetic
MYPYDVPDYAGSYRPESLDVCIYLRKSRKDVEEERRAIEEGSSYNALERHRKRLFAIAKAENHNIIDIFEEVASGESIQERPQMQQLLRKLEGNEIDGVLVIDLDRLGRGDMLDAGMIDRAFRYSSTKIITPTDVYDPDDESWELVFGIKSLISRQELKSITKRLQNGRIDSVKEGKHIGKKPPYGYLKDENLRLYPDPEKAWIVKKIFELMCDGKGRQMIAAELDRLGIDPPVTKRGAWDSSTITSIIKNEVYTGVIVWGKFKHKKRNGKYTRHKNPQEKWIMYENAHEPIISKELFDAANEAHSSRHKPAVITSKKLTNPLAGILKCKLCGYTMLIQTRKDRPHNYLRCNNPACKGKQKQSVFNLVEEKLLYSLQQIVDEYQAQKVEEVEIDDSKLISFKEKAIISKEKELKELQAQKGNLHDLLEQGIYTVEIFLERQKNLVERITSIENDIEVLQKEIETEQIKEHNKTEFIPALKTVIESYHKTTNIELKNQLLKTILSTVTYYRHPDWKTNEFEIQVYFKIS

SEQ ID NO: 1638 - protein, 486 aa, synthetic construct
  REGION 1..486: note = Synthetic
MYPYDVPDYAGSAVGIYIRVSTQEQASEGHSIESQKKKLASYCEIQGWDDYRFYIEEGISGKNTNRPKLKLLMEHIEKGKINILLVYRLDRLTRSVIDLHKLLNFLQEHGCAFKSATETYDTTTANGRMSMGIVSLLAQWETENMSERIKLNLEHKVLVEGERVGAIPYGFDLSDDEKLVKNEKSAILLDMVERVENGWSVNRIVNYLNLTNNDRNWSPNGVLRLLRNPALYGATRWNDKIAENTHEGIISKERFNRLQQILADRSIHHRRDVKGTYIFQGVLRCPVCDQTLSVNRFIKKRKDGTEYCGVLYRCQPCIKQNKYNLAIGEARFLKALNEYMSTVEFQTVEDEVIPKKSEREMLESQLQQIARKREKYQKAWASDLMSDDEFEKLMVETRETYDECKQKLESCEDPIKIDETYLKEIVYMFHQTFNDLESEKQKEFISKFIRTIRYTVKEQQPIRPDKSKTGKGKQKVIITEVEFYQS

SEQ ID NO: 1639 - protein, 482 aa, synthetic construct
  REGION 1..482: note = Synthetic
MNEKNLEIGAAYIRVSTDDQTELSPDAQLRVILEAAKKDGIIIPQEFVFMEDRGRSGRRADNRPEFQRMISTARQNPSPFRYLYLWKFSRFARNQEESAFYKGILRKKCGVTIKSVSEPIMEGMFGRLVEMIIEWSDEFYSVNLSGEVLRGMTQKALEHGYQLTPCLGYDAVGHGRPYVINEEQYQIVEFIHRSFFDGKDMTWIAREANRRGYHTRRGNPFDTRAVRIILTNSFYVGLVKWNDVTFQGTHECRESVTSVFSANQERLNRIHRPRGRRQASSCKHWLSGLLKCSICGASLGYNQTKDLTKRGHAFQCWKYTKGIHPGSCSVSSLKAEAAVLESLQMILETGEVEYTYEQREKHLDDNKLTLIQKSLERLDTKELRIREAYESGIDTLDEFKTNKARLQRERDQLMEELEELHSQEEPEDVPGKEILIERIQNVYDLLQSPDVDNDDKGNAVRSIIKKIVYIKESKTFCFYYYV

SEQ ID NO: 1640 - protein, 493 aa, synthetic construct
  REGION 1..493: note = Synthetic
MKEKVSERKTGAIYIRVSTDKQEELSPDAQLRLLLDYAKKDSIDVPKEYIFQDNGISGRKANKRPAFQNMIALAKSKEHPIDTIIVWKFSRFARNQEESIVYKSLLKKNNVDVVSVSEPLIDGPFGSLIERIIEWMDEYYSIRLSGEVMRGMTQNAMRGHYQSDAPIGYTSPGDKKPPVINPDTVQIPLMIKDMFLSGSTQLQIARKLNDSGYRTKRGNLWDARGVRYVLENPFYIGKSRWNYTERGRRLKPADEVIYADGNWEALWDEDTFKEIQKRLALNMRKSKSRDISAAKHWLSGLLICSSCGGTLAFGGAHNMRGFQCWKYSKGFCSESHYISTGPIEKMVLEYLEAVMHSPALSYTVISSSSVDASSKLSDLERQLQKIDAKEKRIKAAYLNEIDTLEEYKANKTALEEERRTVEKEIEELTLSDVKYSKEDLDKKMKQNISDLLRVLRDESADYIQKGNMMRNVVDHIVFNRKNTSLDVFLKLVV

SEQ ID NO: 1641 - DNA, 43 bp, synthetic construct
  misc_feature 1..43: note = Synthetic
  source 1..43: mol_type = other DNA
cgatttcttggctttatatatcttgtggaaaggacgaaacacc

SEQ ID NO: 1642 - DNA, 59 bp, synthetic construct
  misc_feature 1..59: note = Synthetic
  variation 36..41: note = n is a, c, g, or t
  source 1..59: mol_type = other DNA
ttattacagggacagcagagatccagtttatcgatnnnnnnatcgcggtacgccaagct

SEQ ID NO: 1643 - DNA, 58 bp, synthetic construct
  misc_feature 1..58: note = Synthetic
  variation 34..37: note = n is a, c, g, or t
  source 1..58: mol_type = other DNA
acactctttccctacacgacgctcttccgatctnnnntgggcacgcgtttaatataag

SEQ ID NO: 1644 - DNA, 49 bp, synthetic construct
  misc_feature 1..49: note = Synthetic
  source 1..49: mol_type = other DNA
tggagttcagacgtgtgctcttccgatctagatccagccctggactagc

SEQ ID NO: 1645 - DNA, 20 bp, synthetic construct
  misc_feature 1..20: note = Synthetic
  source 1..20: mol_type = other DNA
gctgggcacgcgtttaatat

SEQ ID NO: 1646 - DNA, 19 bp, synthetic construct
  misc_feature 1..19: note = Synthetic
  source 1..19: mol_type = other DNA
gggccaccaaggagaactt

SEQ ID NO: 1647 - DNA, 57 bp, synthetic construct
  misc_feature 1..57: note = Synthetic
  variation 34..37: note = n is a, c, g, or t
  source 1..57: mol_type = other DNA
acactctttccctacacgacgctcttccgatctnnnnatgagaccgtgacttgccag

SEQ ID NO: 1648 - DNA, 49 bp, synthetic construct
  misc_feature 1..49: note = Synthetic
  source 1..49: mol_type = other DNA
tggagttcagacgtgtgctcttccgatcttgctgttgttgaaggcgttt

SEQ ID NO: 1649 - DNA, 18 bp, synthetic construct
  misc_feature 1..18: note = Synthetic
  source 1..18: mol_type = other DNA
cttgccagccccacagag

SEQ ID NO: 1650 - DNA, 20 bp, synthetic construct
  misc_feature 1..20: note = Synthetic
  source 1..20: mol_type = other DNA
ctgtgggacaagaggatcag

SEQ ID NO: 1651 - DNA, 19 bp, synthetic construct
  misc_feature 1..19: note = Synthetic
  source 1..19: mol_type = other DNA
atgatcctgacgacggaga

SEQ ID NO: 1652 - DNA, 20 bp, synthetic construct
  misc_feature 1..20: note = Synthetic
  source 1..20: mol_type = other DNA
tgtaccgtacaccactgaga

SEQ ID NO: 1653 - DNA, 27 bp, synthetic construct
  misc_feature 1..27: note = Synthetic
  source 1..27: mol_type = other DNA
ttgtccatcactggcatctggactcca

SEQ ID NO: 1654 - DNA, 21 bp, synthetic construct
  misc_feature 1..21: note = Synthetic
  source 1..21: mol_type = other DNA
ctctttatggcccttgtcact

SEQ ID NO: 1655 - DNA, 20 bp, synthetic construct
  misc_feature 1..20: note = Synthetic
  source 1..20: mol_type = other DNA
ccatcacacatagaccctgc

SEQ ID NO: 1656 - DNA, 27 bp, synthetic construct
  misc_feature 1..27: note = Synthetic
  source 1..27: mol_type = other DNA
cattggactctagaatgaagccaggca

SEQ ID NO: 1657 - DNA, 20 bp, synthetic construct
  misc_feature 1..20: note = Synthetic
  source 1..20: mol_type = other DNA
cccgatattcctcaggtact

SEQ ID NO: 1658 - DNA, 21 bp, synthetic construct
  misc_feature 1..21: note = Synthetic
  source 1..21: mol_type = other DNA
ggatgaaacccagacacatag

SEQ ID NO: 1659 - DNA, 24 bp, synthetic construct
  misc_feature 1..24: note = Synthetic
  source 1..24: mol_type = other DNA
cgtcatccagcagagaatggaaag